(19) United States
(12) Patent Application Publication
(10) Pub. No.: US 2021/0389308 A1
(43) Pub. Date: Dec. 16, 2021

(54) DETECTING ADAPTIVE IMMUNITY TO CORONAVIRUS

(71) Applicant: NONIGENEX, INC., LA JOLLA, CA (US)

(72) Inventors: Jerome P. LAPOINTE, LA JOLLA, CA (US); Andrew SENYEI, LA JOLLA, CA (US)

(21) Appl. No.: 17/408,096

(22) Filed: Aug. 20, 2021

Related U.S. Application Data
(63) Continuation of application No. PCT/US21/25409, filed on Apr. 1, 2021.
(60) Provisional application No. 63/161,869, filed on Mar. 16, 2021.
(60) Provisional application No. 63/119,854, filed on Dec. 1, 2020.
(60) Provisional application No. 63/052,922, filed on Jul. 16, 2020.
(60) Provisional application No. 63/042,394, filed on Jun. 22, 2020.
(60) Provisional application No. 63/013,422, filed on Apr. 21, 2020.
(60) Provisional application No. 63/009,992, filed on Apr. 14, 2020.
(60) Provisional application No. 63/005,168, filed on Apr. 3, 2020.

(51) Int. Cl. G01N 33/536; G01N 33/543; G01N 33/68

(52) U.S. Cl. CPC G01N 33/536; G01N 2333/165; G01N 33/6854; G01N 33/543

(57) ABSTRACT

Provided are devices, systems, methods and kits for determining whether a subject is immune to an infection by a disease-causing pathogen by measuring neutralizing antibodies against the disease-causing pathogen in a biological sample from the subject. The devices, systems, methods, and kits described herein are useful for confirming whether a vaccine against the disease-causing pathogen has elicited enough neutralizing antibodies to prevent a later infection, or lessen severity of disease caused by, the disease-causing pathogen. Such devices, systems, methods, and kits are also useful for detecting an infection in the subject.

### CROSS-REFERENCE

[0001] This application is a continuation of International Application No. PCT/US21/25409, filed Apr. 1, 2021, which claims the benefit of U.S. Provisional Application No. 63/161,869, filed Mar. 16, 2021, U.S. Provisional Application No. 63/119,854, filed Dec. 1, 2020, U.S. Provisional Application No. 63/052,922, filed Jul. 16, 2020, U.S. Provisional Application No. 63/042,394, filed Jun. 22, 2020, U.S. Provisional Application No. 63/013,422, filed Apr. 21, 2020, U.S. Provisional Application No. 63/009,992, filed Apr. 14, 2020, and U.S. Provisional Application No. 63/005,168, filed Apr. 3, 2020, each of which is hereby incorporated by reference in its entirety.

### SEQUENCE LISTING

[0002] The instant application contains a Sequence Listing which has been submitted electronically in ASCII format and is hereby incorporated by reference in its entirety. Said ASCII copy, created on Aug. 19, 2021, is named 58552-701_301_SL.txt and is 1,204,010 bytes in size.

### BACKGROUND

[0003] Viral infections on a cellular level are mediated by viruses binding to receptors expressed on the surface of a target cell. For example, the spike glycoprotein of a coronavirus binds to the angiotensin-converting enzyme 2 (ACE2) receptor, and binding between the receptor-binding domain (RBD) of the spike protein and ACE2 precedes entry of the coronavirus into the cell. Individuals who are exposed to a new virus (e.g., coronavirus) may develop neutralizing antibodies against the virus to block viral infection. This adaptive immune response significantly reduces incidences of a second infection by the same virus.

[0004] The coronavirus disease of 2019 (COVID-19) is an ongoing pandemic caused by severe acute respiratory syndrome coronavirus 2 (SARS-CoV-2). There is an unprecedented need for effective and safe vaccines against SARS-CoV-2. Even those who are infected with SARS-CoV-2 and recover face severe side-effects, and even death, post recovery. Post-COVID syndrome, which includes cardiac, neuro, and respiratory complications, can persist indefinitely. One third of recovered COVID-19 hospitalized patients are readmitted, and 1 in 8 die within 5 months. In an effort to fast track the regulatory approval process for new vaccines against SARS-CoV-2, regulatory agencies and vaccine developers may look to surrogate markers of protection against future infections by SARS-CoV-2 until proof of protection is available. This means that new vaccines entering the market, although proven to be safe, may not be effective.

[0005] Infectious disease experts believe there is a strong correlation between protection from a future infection by SARS-CoV-2 and the presence of neutralizing antibody titers. Yet, out of the dozens of vaccines under clinical investigation today, a vast majority do not test for presence of neutralizing antibodies against SARS-CoV-2 as a primary clinical endpoint. There exists an urgent need for a confirmatory diagnostic test that measures neutralizing antibody titers to determine whether a legally commercialized vaccine is effective to confer immunity against SARS-CoV-2 (e.g., post-allowance or licensure of the vaccine). With nearly 320 million people in the United States alone in need of vaccination, the neutralizing antibody test needed must be scalable and cost-efficient.

[0006] Reliance on surrogate markers of protection may result in a larger portion of subjects that will not respond to the new legally commercialized vaccine as compared with a comparable vaccine developed within the traditional 15-20 year timeframe. There is a need for a scalable test that measures neutralizing antibodies in a population of individuals after administration of the new SARS-CoV-2 vaccine (e.g., allowed or approved for human or other animal use) and a system that enables non-responders in that population to know whether the new vaccine was effective to induce neutralizing antibodies conferring protection, or not. For example, there is minimal trial data for important sub-populations, such as those of the non-white race, and those currently having one or more risk factors related to COVID-19. There is also no data on larger subgroups who are excluded from clinical trials, such as those who are pregnant, breastfeeding, or have priorly been infected by COVID-19. Stratifying non-responders from responders to a new vaccine in this context will prevent the unintentional spread of COVID-19 by vaccinated individuals with a “false” sense of immunity. This is particularly critical for protecting our vulnerable populations, including individuals ages 50 and older who are significantly more likely to die from a disease caused by SARS-CoV-2 as compared to younger individuals. For example, published data show that new vaccines entering the market elicit around 40% fewer neutralizing antibodies in subjects ages 65 and older. Clinical trials show the efficacy of the new vaccines in subjects ages 65 and older could be as low as 65%.

[0007] Additionally, the vaccine administration methods taking place pose further problems. With many millions of people waiting several weeks to receive a second COVID-19 vaccine dose in some countries, it is possible that SARS-CoV-2 could evolve vaccine resistance. In addition to the timing of the administered doses being an issue, the durability of the vaccine elicited immune response in patients is not yet known. Further, as millions of people are being vaccinated, health officials are struggling to collect critically important information-such as race, ethnicity and occupation—of every person vaccinated. The data being collected is so scattered that there's little insight into which health care workers, or first responders, have been among the people getting the initial vaccines, as intended—or how many doses instead have gone to people who should be much further down the list.

[0008] In addition, the fragile thermostability of vaccines means that any delay during distribution poses a risk that the vaccines will have reduced potency upon arrival to its destination. As one example, delays in distribution due to unpredictable and extreme weather conditions across the United States are a source of major concern. Addressing this challenge for vaccines against SARS-CoV-2 is made even more difficult with the limited number of facilities around the world manufacturing the vaccines requiring longer delivery routes.

[0009] However, this challenge is not limited to delays in distribution. For a clinic to receive a vaccine, they must have ultra-low cold storage sufficient to hold the vaccine at low enough temperatures. The vaccine must be kept at low temperatures in order to preserve its potency. For example, even opening freezers repeatedly can harm vaccines stored in the freezer and inadvertently lower their potency. Once a clinic receives a vaccine shipment, health workers thaw out the vials in a refrigerator as they prepare to give injections to patients. But once a vaccine is thawed, it is only viable for a few days and cannot be re-frozen. Thus, there exists a need for a test that can determine whether a vaccine administered to a subject is effective to meet this unprecedented need.

[0010] Shelter-in-place mandates all over the world designed to reduce the spread of COVID-19 are having severe and long-lasting negative socioeconomic and economic consequences. In theory, reintegration into society of individuals with enough neutralizing antibody titers conferring immunity to SARS-CoV-2 is possible, provided there is a reliable and scalable test to measure whether a subject has sufficient neutralizing antibody titers against SARS-CoV-2 to confer protection. However, existing SARS-CoV-2 tests are not scalable. Thus, there exists a need for a test that can measure neutralizing antibodies that is scalable to meet this unprecedented need.

### SUMMARY

[0011] Provided herein are testing devices and methods of their use that detect one or more neutralizing antibodies in a biological sample from a subject that functionally block pathogen binding to its cognate receptor. In some embodiments, a presence or requisite level of neutralizing antibodies is a surrogate for protection against a future infection by the pathogen. Methods described herein provide for centralizing and automated assay systems to measure neutralizing antibodies for screening large numbers of subjects, such as a population or occupation group (e.g., healthcare workers), in a manner that is low cost and scalable.

[0012] The testing devices, systems and methods described herein are useful for confirming whether a vaccine against the pathogen is effective to confer immunity in a subject (or population of subjects) or in a manner expected of the vaccine developer, and therefore, protection against a future infection by the pathogen. In some embodiments, the subject is a human or another animal, such as a household pet or farm animal. The ability to understand whether a portion of the population does not respond to (e.g., is not protected by) a novel vaccine licensed for human use will empower highly informed decision-making by vaccine developers and regulatory entities about how and when a novel vaccine should be utilized post-licensure. If a subject is identified as a non-responder to a vaccine, methods described herein include notifying the subject to prevent the spread of infection. When performed on a large scale, the methods described herein will mitigate risk associated with development and licensure of novel vaccines, thereby encouraging more vaccines to enter the market to meet the unprecedented need.

[0013] In some embodiments, detecting neutralizing antibodies that functionally block pathogen binding to its cognate receptor and detecting the presence of total antibodies against the pathogen are performed simultaneously by the testing devices described herein to, for example, identify a subject that was exposed to the pathogen or a different pathogen and who may not be immune (or protected) from a future infection by the pathogen. In some embodiments, the testing devices described herein also detect a presence of total antibodies (e.g., IgG, IgM, IgA) against the pathogen that are unique to the subject. In some embodiments, the testing devices, systems and methods also measure a presence or level of a biomarker, such as a proinflammatory biomarker.

[0014] Methods of using the devices described herein, comprise assaying a biological sample from a subject with the testing device and detecting a complex between the neutralizing antibodies and a detectable peptide-conjugate derived from the pathogen. In some embodiments, methods comprise detecting with the naked eye. Also provided are systems comprising the testing device and an imaging device, such as a smartphone. In some embodiments, detecting comprises capturing an image of a detection zone of the testing device, analyzing the data from the image, and providing a result to the subject. In some embodiments, the pathogen is severe acute respiratory syndrome coronavirus 2 (SARS-CoV-2).

[0015] Aspects disclosed herein provide methods of measuring a presence, an absence, or a quantity of neutralizing antibodies against a coronavirus that functionally block binding between a spike protein of the coronavirus and Angiotensin-converting enzyme 2 (ACE2), the method comprising: (a) providing a biological sample obtained from one or more finger pricks of a subject that was administered a vaccine against the coronavirus; (b) bringing at least a portion of the biological sample into contact with: (i) a first peptide or protein comprising the ACE2 polypeptide or a portion thereof; and (ii) a second peptide or protein comprising the spike protein or a portion thereof, wherein: (1) the first peptide or protein and the second peptide or protein form a complex in an absence of neutralizing antibodies in the biological sample that block binding between the spike protein and ACE2 under conditions otherwise suitable for binding; and (2) the first peptide or protein, the second peptide or protein, or a combination thereof comprises a detectable moiety; (c) detecting an absence, a presence, or a quantity of the complex formed in (b); and (d) measuring the presence, the absence, or the quantity of the neutralizing antibodies against the coronavirus, which is inversely correlated with the presence, the absence, or the quantity of the complex detected in (c), respectively. In some embodiments, the biological sample is classified based on the measuring in (d) by a mobile application on a personal electronic device comprising a smartphone, a tablet, or a personal computer. In some embodiments, the method does not consist of utilizing an immortalized cell or immortalized cell culture. In some embodiments, the methods further comprise providing a result to a user on an electronic device regarding the presence, the absence, or the quantity of the neutralizing antibodies against the coronavirus in the biological sample to aid in the prognosis of the subject related to an infection by the coronavirus based, at least in part, on the measuring in (d). In some embodiments, the method further comprise: (a) bringing the biological sample into contact with a capture moiety specific to one or more antibodies against the coronavirus; and (b) detecting, in the biological sample, a presence, an absence, or a quantity of the one or more antibodies against the coronavirus, wherein the one or more antibodies against the coronavirus is not a neutralizing antibody. In some embodiments, the one or more antibodies against the coronavirus belong to a class of antibodies comprising immunoglobulin A, immunoglobulin M, immunoglobulin G, or a combination thereof. In some embodiments, the vaccine against the coronavirus is approved by a regulatory agency for prevention of a disease caused by the coronavirus. In some embodiments, methods further comprise administering a second dose of the vaccine against the coronavirus to the subject. In some embodiments, the spike protein of the coronavirus comprises a receptor binding domain specific for binding with ACE2 in vivo. In some embodiments, the coronavirus is a Severe acute respiratory syndrome-related (SARS) virus. In some embodiments, the SARS is SARS-CoV-2. In some embodiments, the biological sample comprises capillary blood. In some embodiments, the human subject is an age that is equal to about 50, 51, 52, 53, 54, 55, 56, 57, 58, 59, 60, 61, 62, 63, 64, 65, 66, 67, 68, 69, 70, 71, 72, 73, 74, or 75 years old. In some embodiments, the methods further comprise, prior to (b): eluting the at least the portion of the biological sample from a dried blood spot card.

[0016] Aspects disclosed herein provide systems for point ofneed or point of care comprising: a testing device or module to detect neutralizing antibodies against a coronavirus in a biological sample obtained from a subject that was administered a pharmaceutical formulation comprising a vaccine against the coronavirus that is formulated for human administration, wherein the neutralizing antibodies functionally block binding between a spike protein of the coronavirus and Angiotensin-converting enzyme 2 (ACE2) to aid in the diagnosis of a disease or a condition caused by the coronavirus at the point of need or the point of care, the testing device comprising: (a) a first peptide or protein comprising the ACE2 polypeptide or a portion thereof; and (b) a second peptide or protein comprising the spike protein or a portion thereof, wherein the first peptide or protein and the second peptide or protein form a complex in an absence of neutralizing antibodies in the biological sample that block binding between the spike protein and ACE2 under conditions otherwise suitable for binding, and wherein the first peptide or protein, or the second peptide or protein comprises a detectable moiety. In some embodiments, the systems further comprise a mobile application that runs on a personal electronic device, wherein the mobile application is programmed to generate a classification of a biological sample from the subject as having a presence, an absence, or a quantity of one or more neutralizing antibodies against the coronavirus by analyzing image data from an image of the testing device at the point of need or the point of care to aid in the diagnosis of the disease or the condition caused by the coronavirus in the subject. In some embodiments, the testing device is portable. In some embodiments, the system does not consist of a cell or a cell culture. In some embodiments, the spike protein of the coronavirus comprises a receptor binding domain specific for binding with ACE2 in vivo. In some embodiments, the coronavirus is a Severe acute respiratory syndrome-related (SARS) virus. In some embodiments, the SARS is SARS-CoV-2. In some embodiments, the neutralizing antibodies against a coronavirus are detected using the testing device or module by contacting a biological sample with the first peptide or protein and the second peptide or protein, wherein a presence, an absence, or a quantity of neutralizing antibodies against a coronavirus in the biological sample are inversely correlated with a presence, an absence, or a quantity of a labeled complex formed between the first peptide or protein and the second peptide or protein, respectively, in the presence of the biological sample. In some embodiments, the systems further comprise: (a) a biological sample contacted with the first peptide or protein and the second peptide or protein of the device or module, wherein the first peptide or protein and the second peptide or protein are bound to each other in the presence of the biological sample. In some embodiments, the biological sample comprises capillary blood. In some embodiments, the human subject is an age that is equal to about 50, 51, 52, 53, 54, 55, 56, 57, 58, 59, 60, 61, 62, 63, 64, 65, 66, 67, 68, 69, 70, 71, 72, 73, 74, or 75 years old. In some embodiments, the methods further comprise, prior to (b): eluting the at least the portion of the biological sample from a dried blood spot card.

[0017] Aspects provided here are methods for detecting a neutralizing antibody against the spike (S) protein of a coronavirus (CoV) in a biological sample from a human subject that was vaccinated against the CoV, the method comprising: (a) obtaining the biological sample obtained from the human subject that was vaccinated against the CoV; (b) analyzing at least a portion of the biological sample to detect a level of the neutralizing antibody against the coronavirus that blocks binding between the S protein of the CoV (CoV S) and Angiotensin-converting enzyme 2 (ACE2) in the biological sample by: (i) contacting the biological sample with (1) a first protein comprising ACE2, or a fragment thereof, that binds to the CoV S protein, or a fragment thereof, and (2) a second protein comprising the CoV S protein, or the fragment thereof, that binds to the ACE2, or the fragment thereof, under conditions that permit binding between the ACE2 or fragment thereof, and the CoV S protein or fragment thereof, to produce an ACE2-CoV S complex, wherein the first protein or the second protein is labeled directly or indirectly with a detection reagent; and (ii) detecting a signal corresponding to a level of the ACE2-CoV S complex in the biological sample wherein the signal is inversely correlated with the level of the neutralizing antibody in the biological sample; and (c) detecting the level of the neutralizing antibody in the biological sample based, at least in part, on the signal detected in (a)(ii), wherein performing steps (b) to (c) is performed without a washing step. In some embodiments, the methods further comprise administering a second dose of the vaccine to the subject, provided the presence or the high quantity of the complex is detected in (c). In some embodiments, the vaccine is approved by a regulatory agency for prevention of a disease caused by the coronavirus. In some embodiments, (a)-(c) are performed at a point of need or a point of care. In some embodiments, analyzing in (b) is performed without use of a cell or a cell culture. In some embodiments, methods further comprise: (d) detecting, in a biological sample obtained from the subject, a presence, an absence, or a quantity of one or more antibodies against coronavirus, wherein the one or more antibodies is not a neutralizing antibody. In some embodiments, wherein analyzing in (b) and detecting in (c) are performed with a single integrated device. In some embodiments, wherein (c) is performed by an application on a personal electronic device based, at least in part, on the analysis of (b). In some embodiments, the spike protein of the coronavirus comprises a receptor binding domain specific for binding with ACE2 in vivo. In some embodiments, the coronavirus is a Severe acute respiratory syndrome-related (SARS) virus. In some embodiments, the SARS is SARS-CoV-2. In some embodiments, the biological sample comprises capillary blood. In some embodiments, the human subject is an age that is equal to about 50, 51, 52, 53, 54, 55, 56, 57, 58, 59, 60, 61, 62, 63, 64, 65, 66, 67, 68, 69, 70, 71, 72, 73, 74, or 75 years old. In some embodiments, the methods further comprise, prior to (b): eluting the at least the portion of the biological sample from a dried blood spot card.

[0018] Aspects provided here are systems for analyzing a biological sample from a subject that was administered a dose of a vaccine against a coronavirus that has a spike protein, the system comprising: (a) a first testing device or module to detect a presence, an absence, or a level of neutralizing antibodies that functionally block binding between the spike protein of the coronavirus and Angiotensin-converting enzyme 2 (ACE2), wherein the first testing device or module comprises: (i) a first peptide or protein comprising an ACE2 polypeptide, or a portion thereof; (ii) a second peptide or protein comprising a spike protein, or portion, wherein the portion of the ACE2 polypeptide and the portion of the spike protein are configured to bind; and (iii) a test zone for visualization of a complex between (i) and (ii); and (b) a second testing device or module to measure a presence, an absence, or a level of one or more non-neutralizing antibodies against the coronavirus, wherein the second testing device or module comprises: (i) a surface; and (ii) a detectable capture molecule coupled thereto, wherein the detectable capture molecule is specific to the one or more non-neutralizing antibodies. In some embodiments, the systems further comprise an imaging device operatively coupled to the first device, wherein the imaging device is configured to capture an image of the test zone. In some embodiments, the systems further comprise an imaging device operatively coupled to the second device, the imaging device configured to capture an image of the surface. In some embodiments, the imaging device comprises one or more processors configured to generate a classification of the biological sample as having the presence, the absence, or the level of the neutralizing antibodies against the coronavirus. In some embodiments, the imaging device comprises one or more processors configured to generate a second classification of the biological sample as having the presence, the absence, or the level of the presence, the absence, or the level of the one or more non-neutralizing antibodies against the coronavirus. In some embodiments, the systems further comprise an application on an electronic device, the application configured to display on a graphical user interface a report comprising a classification of the biological sample, wherein the classification comprises: (a) the presence, the absence, or the level of the neutralizing antibodies against the coronavirus; or (b) the presence, the absence, or the level of the one or more non-neutralizing antibodies against the coronavirus. In some embodiments, the test zone is positioned at the surface and wherein the first peptide or protein or the second peptide or protein is coupled to the surface at the test zone directly or indirectly. In some embodiments, the first testing module and the second testing module are in a single integrated device. In some embodiments, the first testing device and the second testing device are portable. In some embodiments, the first testing device or module does not consist of a cell or a cell culture. In some embodiments, the spike protein of the coronavirus comprises a receptor binding domain specific for binding with ACE2 in vivo. In some embodiments, the coronavirus is a Severe acute respiratory syndrome-related (SARS) virus. In some embodiments, the SARS is SARS-CoV-2. In some embodiments, the biological sample comprises capillary blood. In some embodiments, the human subject is an age that is equal to about 50, 51, 52, 53, 54, 55, 56, 57, 58, 59, 60, 61, 62, 63, 64, 65, 66, 67, 68, 69, 70, 71, 72, 73, 74, or 75 years old. In some embodiments, the systems further comprising a dried blood spot card comprising the biological sample contained therein or thereon.

[0019] Aspects disclosed herein provide methods for detecting a presence, an absence, or a quantity of neutralizing antibodies against a coronavirus in biological samples obtained from a population of human subjects vaccinated against the coronavirus, the method comprising: (a) providing the biological samples obtained from the population of human subjects vaccinated against the coronavirus, wherein the biological samples have an average volume of less than 1 milliliter when obtained; (b) introducing at least a portion of the biological samples to a testing device or module to detect neutralizing antibodies against the coronavirus that functionally block binding between a spike protein of the coronavirus and Angiotensin-converting enzyme 2 (ACE2), wherein the testing device or module comprises: (i) a first peptide or protein comprising the ACE2 polypeptide or a portion thereof that binds to the spike protein or a portion thereof; and (ii) a second peptide or protein comprising the spike protein or the portion thereof, wherein (i), (ii), or a combination of (i) and (ii) comprises a detectable label; and (c) detecting, with the testing device or module, a presence, an absence, or a quantity of a complex formed between (i) and (ii) in the presence of the biological samples, wherein the presence, the absence, or the quantity of the complex is inversely correlated with the presence, the absence, or the quantity of the neutralizing antibodies against the coronavirus in the biological samples, respectively. In some embodiments, the methods further comprise administering to the subject a dose of the vaccine against the coronavirus before or after performing (a) and (b). In some embodiments, the testing device is a point of need or a point of care device. In some embodiments, the method does not consist of utilizing a cell or a cell culture. In some embodiments, the vaccine is formulated in a pharmaceutical composition approved for human administration by a regulatory agency for prevention of a disease caused by the coronavirus. In some embodiments, at least one human subject of the population of human subjects resides in a geographical location of interest. In some embodiments, the spike protein of the coronavirus comprises a receptor binding domain specific for binding with ACE2 in vivo. In some embodiments, the coronavirus is a Severe acute respiratory syndrome-related (SARS) virus. In some embodiments, the SARS is SARS-CoV-2. In some embodiments, the first biological sample and the second biological sample are capillary blood samples. In some embodiments, the biological sample comprises capillary blood. In some embodiments, the human subject is an age that is equal to about 50, 51, 52, 53, 54, 55, 56, 57, 58, 59, 60, 61, 62, 63, 64, 65, 66, 67, 68, 69, 70, 71, 72, 73, 74, or 75 years old. In some embodiments, the methods further comprise, prior to (b): eluting the at least the portion of the biological sample from a dried blood spot card.

[0020] Aspects disclosed herein provide methods of analyzing a biological sample, the method comprising: (a) bringing a first biological sample obtained from a subject and a second biological obtained from the subject in contact with a system comprising: (i) a first testing device or module to detect in the first biological sample a presence, an absence, or a quantity of neutralizing antibodies against a coronavirus that functionally block binding between a spike protein of the coronavirus and Angiotensin-converting enzyme 2 (ACE2), wherein the first testing device or module comprises: (1) a first peptide or protein comprising the ACE2 polypeptide or a portion thereof that binds to the spike protein or a portion thereof; (2) a second peptide or protein comprising the spike protein or the portion thereof, wherein (1), (2), or a combination of (1) and (2) comprises a detectable label; and (3) a first test zone for visualization of a complex formed between (1) and (2) in a presence of the first biological sample; and (ii) a second testing device or module to detect a presence, an absence, or a quantity of one or more antibodies against the coronavirus in the second biological sample, wherein the second testing device or module comprises one or more labeled capture molecules coupled to a surface at a second test zone that is specific to the one or more antibodies; (b) detecting the presence, the absence, or the quantity of the neutralizing antibodies against the coronavirus in the first biological sample using the first testing device or module, wherein the presence, the absence, or the quantity of the neutralizing antibodies against the coronavirus is inversely correlated with the presence, the absence, or the quantity of a complex formed between the first peptide or protein and the second peptide or protein in the presence of the first biological sample, respectively; and (c) detecting the presence, the absence, or the quantity of at least one antibody of the one or more antibodies against the coronavirus in the second biological sample using the second testing device or module, wherein the at least one antibody is an immunoglobulin G, an immunoglobulin M, or an immunoglobulin A. In some embodiments, the first test zone is positioned at the surface adjacent to the second test zone, and wherein the first peptide or protein is coupled to the surface at the second test zone directly or indirectly. In some embodiments, the first testing module and the second testing module are in a single integrated device. In some embodiments, the system is portable. In some embodiments, the neutralizing antibodies are induced by administration of a vaccine against the coronavirus to a subject from whom the first or the second biological sample is obtained prior to performing (a)-(c). In some embodiments, the vaccine is approved by a regulatory agency for prevention of a disease caused by the coronavirus. In some embodiments, the first peptide or protein, the second peptide or protein, or both comprises detectable moiety comprising a nanoparticle, a fluorescent dye, an enzymatic label, or a colorimetric label. In some embodiments, the subject is a population of human subjects. In some embodiments, the spike protein of the coronavirus comprises a receptor binding domain specific for binding with ACE2 in vivo. In some embodiments, the coronavirus is a Severe acute respiratory syndrome-related (SARS) virus. In some embodiments, the SARS is SARS-CoV-2. In some embodiments, the biological sample comprises capillary blood. In some embodiments, the human subject is an age that is equal to about 50, 51, 52, 53, 54, 55, 56, 57, 58, 59, 60, 61, 62, 63, 64, 65, 66, 67, 68, 69, 70, 71, 72, 73, 74, or 75 years old. In some embodiments, the methods further comprise, prior to (b): eluting the at least the portion of the biological sample from a dried blood spot card.

[0021] Aspects disclosed herein provide methods for confirming efficacy of a vaccine in a human subject using a lateral flow assembly, the method comprising: (a) providing a biological sample obtained from the human subject without use of a phlebotomy, wherein the human subject was administered a vaccine against a coronavirus that has a spike protein; (b) bringing at least a portion of the biological sample into contact with: (i) a first peptide or protein comprising an Angiotensin-converting enzyme 2 (ACE2) polypeptide or a portion thereof; and (ii) a second peptide or protein comprising the spike protein or a portion thereof, wherein the first peptide or protein and the second peptide or protein form a complex in an absence of neutralizing antibodies in the biological sample that block binding between the spike protein and ACE2 under conditions otherwise suitable for binding; (c) bringing the at least the portion of the biological sample, the first peptide or protein, and the second peptide or protein into contact with a porous membrane at a test zone of a lateral flow assay assembly that captures the complex formed in (b)(ii) in the absence of the neutralizing antibodies in the at least the portion of the biological sample; and (d) measuring a presence or a high level of the complex formed in (b) at the test zone, thereby confirming that the vaccine is not effective to immunize the human subject against the coronavirus; or (e) measuring an absence or a low level of the complex formed in (b) at the test zone, thereby confirming that the vaccine is effective to immunize the human subject against the coronavirus, wherein the high level and the low level of the complex are relative to an index or a control. In some embodiments, the vaccine is approved by a regulatory agency for prevention of a disease caused by the coronavirus. In some embodiments, (a)-(e) are performed at a point of need or a point of care. In some embodiments, the method further comprising: (a) bringing the biological sample in contact with a capture molecule coupled to the porous membrane at a second test zone, wherein the capture molecule forms a second complex with the one or more antibodies against the coronavirus; and (b) detecting a presence, an absence, or a level of the one or more antibodies against the coronavirus in the biological sample by detecting the second complex at the second test zone. In some embodiments, the one or more antibodies against the coronavirus is immunoglobulin G, immunoglobulin M, immunoglobulin A, or a combination thereof. In some embodiments, the spike protein of the coronavirus comprises a receptor binding domain specific for binding with ACE2 in vivo. In some embodiments, the coronavirus is a Severe acute respiratory syndrome-related (SARS) virus. In some embodiments, the SARS is SARS-CoV-2. In some embodiments, (b) and (c) are performed simultaneously. In some embodiments, the human subject is not enrolled in a clinical trial for the vaccine. In some embodiments, the biological sample is obtained from the human subject by one or more finger pricks. In some embodiments, performing (b) to (e) does not require a wash step. In some embodiments, the human subject is a population of human subjects. In some embodiments, the human subject is an age that is equal to about 50, 51, 52, 53, 54, 55, 56, 57, 58, 59, 60, 61, 62, 63, 64, 65, 66, 67, 68, 69, 70, 71, 72, 73, 74, or 75 years old. In some embodiments, the methods further comprise, prior to (b): eluting the at least the portion of the biological sample from a dried blood spot card.

[0022] Aspects disclosed herein provide systems to confirm efficacy of a vaccine against a coronavirus in a human subject, the system comprising: (a) a first peptide or protein comprising an Angiotensin-converting enzyme 2 (ACE2) polypeptide, or a portion thereof; (b) a second peptide or protein comprising a spike protein, or a portion thereof, wherein the first peptide or protein and the second peptide or protein form a complex in an absence of neutralizing antibodies that block binding between the spike protein and ACE2 under conditions otherwise suitable for binding; and (c) a lateral flow assay assembly comprising a porous membrane that, when contacted with the first peptide or protein, the second peptide or protein, and a biological sample obtained from a human subject, comprises: (i) a presence or a high level of the complex coupled thereto when there is an absence or a low level of the neutralizing antibodies in the biological sample, wherein the high level of the complex is relative to an index or a control; or (ii) an absence or a low level of the complex coupled thereto when there is a presence or a high level of the neutralizing antibodies in the biological sample, wherein the low level of the complex is relative to the index or the control. In some embodiments, the vaccine is approved by a regulatory agency for prevention of a disease caused by the coronavirus. In some embodiments, the system is a point of need or a point of care system. In some embodiments, wherein (a) and (b) are in a homogenous mixture. In some embodiments, the system further comprises a sample receptor mechanically coupled to the porous membrane, wherein the sample receptor retains the biological sample from a human subject. In some embodiments, the system is portable. In some embodiments, the system further comprises an application on a personal electronic device, wherein the application is programed to generate a classification of the biological sample as having the presence, the absence, or the level of the neutralizing antibodies against the coronavirus by analyzing image data from an image of the porous membrane of the lateral flow assay assembly. In some embodiments, the spike protein of the coronavirus comprises a receptor binding domain specific for binding with ACE2 in vivo. In some embodiments, the coronavirus is a Severe acute respiratory syndrome-related (SARS) virus. In some embodiments, the SARS is SARS-CoV-2. In some embodiments, (b) and (c) are performed simultaneously. In some embodiments, the human subject is not enrolled in a clinical trial for the vaccine. In some embodiments, the biological sample is obtained from the human subject by one or more finger pricks. In some embodiments, performing (b) to (e) does not require a wash step. In some embodiments, the human subject is a population of human subjects. In some embodiments, the human subject is an age that is equal to about 50, 51, 52, 53, 54, 55, 56, 57, 58, 59, 60, 61, 62, 63, 64, 65, 66, 67, 68, 69, 70, 71, 72, 73, 74, or 75 years old. In some embodiments, the systems further comprising a dried blood spot card comprising the biological sample contained therein or thereon.

[0023] Aspects disclosed herein provide kits for confirming efficacy of a vaccine in a human subject, the kit comprising: (a) a first peptide or protein comprising an Angiotensin-converting enzyme 2 (ACE2) polypeptide, or a portion thereof; (b) a second peptide or protein comprising a spike protein, or a portion thereof, wherein the first peptide or protein and the second peptide or protein form a complex in an absence of neutralizing antibodies that block binding between the spike protein and ACE2 under conditions otherwise suitable for binding; (c) a lateral flow assay assembly comprising a porous membrane having coupled thereto: (i) the first peptide or protein; (ii) the second peptide or protein; or (iii) a capture molecule specific to (i), (ii), or a protein tag conjugated thereto; and (d) instructions for confirming efficacy of the vaccine in the human subject by: (i) contacting the biological sample with (c)(i) (c)(ii), or (c)(iii) coupled to the porous membrane of the lateral flow assay assembly; and (ii) detecting a presence, an absence, or a level of the neutralizing antibodies against the coronavirus in the biological sample by detecting a presence, an absence, or a level of the complex coupled to the porous membrane of the lateral flow assembly. In some embodiments, the kit further comprises a sample receptor mechanically coupled to the porous membrane, wherein the sample receptor contains the biological sample. In some embodiments, the kit further comprises instructions for: (a) obtaining the biological sample; (b) detecting a presence, an absence, or a level of a complex formed between the first peptide or protein and the second peptide or protein in a presence of the biological sample using the lateral flow assay assembly; and (c) classifying the biological sample as having the presence, the absence, or the level of the neutralizing antibodies against the coronavirus. In some embodiments, the kit further comprises instructions for downloading an application on a personal electronic device, wherein the application is programmed to analyze image data from an image of the test zone of the lateral flow assay assembly to classify the biological sample as having the presence, the absence, or the level of neutralizing antibodies against the coronavirus. In some embodiments, the kit further comprises: (a) a second capture molecule coupled to the porous membrane that is specific to one or more antibodies against the coronavirus, wherein the one or more antibodies comprises an immunoglobulin G, an immunoglobulin M, an immunoglobulin A, or a combination thereof; and (b) instructions for: (i) detecting a presence, an absence, or a level of a second complex between the second capture molecule and the one or more antibodies against the coronavirus in the presence of the biological sample using the lateral flow assembly; and (ii) classifying the biological sample as having a presence, an absence, or a level of the one or more antibodies against the coronavirus in the biological sample based the second complex that is detected. In some embodiments, the spike protein of the coronavirus comprises a receptor binding domain specific for binding with ACE2 in vivo. In some embodiments, the coronavirus is a Severe acute respiratory syndrome-related (SARS) virus. In some embodiments, the SARS is SARS-CoV-2. In some embodiments, the human subject is not enrolled in a clinical trial for the vaccine. In some embodiments, the biological sample is obtained from the human subject by one or more finger pricks. In some embodiments, the human subject is a population of human subjects. In some embodiments, the human subject is an age that is equal to about 50, 51, 52, 53, 54, 55, 56, 57, 58, 59, 60, 61, 62, 63, 64, 65, 66, 67, 68, 69, 70, 71, 72, 73, 74, or 75 years old. In some embodiments, kits further comprising a dried blood spot card comprising the biological sample contained therein or thereon.

[0024] Aspects disclosed herein provide methods of measuring vaccine-induced neutralizing antibodies against a coronavirus, the method comprising: (a) providing a biological sample obtained from a subject that was administered a vaccine against a coronavirus, wherein the coronavirus is encoded by a nucleic acid sequence having greater than or equal to about 80% sequence identity to SEQ ID NO 7-10, 13-20, 43, 67, or 91; (b) detecting, in the biological sample, a presence or a quantity of a labeled complex formed between at least two of: (i) a first peptide or protein comprising an amino acid sequence that is at least 80% identical to any one of SEQ ID NOS: 2-6, 11-12, 24, 47-48, 71-72, 95-96, or 115; (ii) a second peptide or protein comprising an amino acid sequence that is at least 80% identical to SEQ ID NO: 1; and (iii) a neutralizing antibody against the coronavirus in the biological sample; and (c) generating a classification of the biological sample based, at least partially, on (b) as having sufficient or insufficient vaccine-induced neutralizing antibodies to confer immunity against the coronavirus. In some embodiments, the vaccine is allowed by a regulatory agency for the prevention of disease caused by the coronavirus. In some embodiments, the method further comprises administering a second dose of the vaccine to the subject, provided a presence or a quantity of a labeled complex formed between (i) and (iii) is detected in (b). In some embodiments, the method further comprises administering a second dose of the vaccine to the subject, provided a presence or a quantity of a labeled complex formed between (i) and (iii) is detected in (b). In some embodiments, (a)-(c) are performed at the point of need or point of care. In some embodiments, (b) is performed using a lateral flow assay, agglutination assay, an enzyme-linked immunoassay, photonic ring resonance, or a combination thereof. In some embodiments, a multiple doses of the vaccine are administered to the subject at different timepoints, and steps (a)-(c) are repeated following each dose of a multiple doses to measure vaccine-induced neutralizing antibodies against the coronavirus. In some embodiments, steps (a)-(c) are performed within at least 1 month after a first dose of the vaccine. In some embodiments, steps (a)-(c) are performed within at least 2 months after a first dose of the vaccine. In some embodiments, steps (a)-(c) are performed within at least 6 months after a first dose of the vaccine. In some embodiments, steps (a)-(c) are performed within at least 12 months after a first dose of the vaccine. In some embodiments, steps (a)-(c) are performed within at least 2 years after a first dose of the vaccine. In some embodiments, steps (a)-(c) are performed within at least 4 years after a first dose of the vaccine. In some embodiments, the subject is a plurality of subjects. In some embodiments, the plurality of subject is not enrolled in a clinical trial for the vaccine. In some embodiments, the plurality of subject is a population of subjects. In some embodiments, the coronavirus is severe acute respiratory syndrome coronavirus 2 (SARS-CoV-2). In some embodiments, the method further comprises determining the efficacy of the vaccine based, at least partially, on (c). In some embodiments, the method further comprises determining the durability of the vaccine based, at least partially, on (c). In some embodiments, the coronavirus is encoded by a nucleic acid sequence having greater than or equal to about 90% sequence identity to SEQ ID NO: 7-10, 13-20, 43, 67, or 91. In some embodiments, the coronavirus is encoded by a nucleic acid sequence having greater than or equal to about 95% sequence identity to SEQ ID NO: 7-10, 13-20, 43, 67, or 91. In some embodiments, the coronavirus is encoded by a nucleic acid sequence having greater than or equal to about 100% sequence identity to SEQ ID NO: 7-10, 13-20, 43, 67, or 91. In some embodiments, the subject is a mammal. In some embodiments, the mammal is a human, dog, cat, monkey, non-human primate, rodent, or a farm animal. In some embodiments, the age of the subject is at least 50 years old. In some embodiments, the biological sample is deposited on a biological sample medium. In some embodiments, the biological sample medium is a dried blood spot card.

[0025] Aspects disclosed herein provide a method comprising: (a) providing a biological sample from a subject that was administered a vaccine against a coronavirus encoded by a nucleic acid sequence having greater than or equal to about 80% sequence identity to SEQ ID NO: 7-10, 13-20, 43, 67, or 91; (b) measuring a presence or level of a neutralizing antibody against the coronavirus in the biological sample by: (i) contacting the biological sample with a first peptide or protein comprising an amino acid sequence that is at least 80% identical to any one of SEQ ID NOS: 2-6, 11-12, 24, 47-48, 71-72, 95-96, or 115, and a second peptide or protein comprising an amino acid sequence that is at least 80% identical to SEQ ID NO: 1; and (ii) detecting a presence or a level a labeled complex between the at least two of (1) the first peptide or protein; (2) the second peptide or protein; and (3) the neutralizing antibody against the coronavirus; and (c) identifying the subject as having or lacking sufficient immunity against the coronavirus, wherein the presence or the level of the complex between (1) and (2) is indicative of lacking sufficient immunity and the presence or the level of the complex between (1) and (3) is indicative of having sufficient immunity. In some embodiments, the vaccine is allowed by a regulatory agency for the prevention of disease caused by the coronavirus. In some embodiments, the method further comprises administering a second dose of the vaccine to the subject, provided a presence or a quantity of a labeled complex formed between (i) and (iii) is detected in (b). In some embodiments, the method further comprises administering a second dose of the vaccine to the subject, provided a presence or a quantity of a labeled complex formed between (i) and (iii) is detected in (b). In some embodiments, (a)-(c) are performed at the point of need or point of care. In some embodiments, (b) is performed using a lateral flow assay, agglutination assay, an enzyme-linked immunoassay, photonic ring resonance, or a combination thereof. In some embodiments, a multiple doses of the vaccine are administered to the subject at different timepoints, and steps (a)-(c) are repeated following each dose of a multiple doses to measure vaccine-induced neutralizing antibodies against the coronavirus. In some embodiments, steps (a)-(c) are performed within at least 1 month after a first dose of the vaccine. In some embodiments, steps (a)-(c) are performed within at least 2 months after a first dose of the vaccine. In some embodiments, steps (a)-(c) are performed within at least 6 months after a first dose of the vaccine. In some embodiments, steps (a)-(c) are performed within at least 12 months after a first dose of the vaccine. In some embodiments, steps (a)-(c) are performed within at least 2 years after a first dose of the vaccine. In some embodiments, steps (a)-(c) are performed within at least 4 years after a first dose of the vaccine. In some embodiments, the subject is a plurality of subjects. In some embodiments, the plurality of subject is not enrolled in a clinical trial for the vaccine. In some embodiments, the plurality of subject is a population of subjects. In some embodiments, the coronavirus is severe acute respiratory syndrome coronavirus 2 (SARS-CoV-2). In some embodiments, the method further comprises determining the efficacy of the vaccine based, at least partially, on (c). In some embodiments, the method further comprises determining the durability of the vaccine based, at least partially, on (c). In some embodiments, the coronavirus is encoded by a nucleic acid sequence having greater than or equal to about 90% sequence identity to SEQ ID NO: 7-10, 13-20, 43, 67, or 91. In some embodiments, the coronavirus is encoded by a nucleic acid sequence having greater than or equal to about 95% sequence identity to SEQ ID NO: 7-10, 13-20, 43, 67, or 91. In some embodiments, the coronavirus is encoded by a nucleic acid sequence having greater than or equal to about 100% sequence identity to SEQ ID NO: 7-10, 13-20, 43, 67, or 91. In some embodiments, the subject is a mammal. In some embodiments, the mammal is a human, dog, cat, monkey, non-human primate, rodent, or a farm animal. In some embodiments, the age of the subject is at least 50 years old. In some embodiments, the biological sample is deposited on a biological sample medium. In some embodiments, the biological sample medium is a dried blood spot card.

[0026] Aspects disclosed herein provide methods of confirming efficacy of a vaccine using a lateral flow assembly, the method comprising: (a) providing a biological sample obtained from a subject that was administered a vaccine against a coronavirus encoded by a nucleic acid sequence having greater than or equal to about 80% sequence identity to SEQ ID NO: 7-10, 13-20, 43, 67, or 91; (b) bringing the biological sample into contact with a porous membrane at a test zone of a lateral flow assay assembly adapted to detect a presence or a level of a labeled complex coupled thereto, where the labeled complex is formed between at least two of: (i) a first peptide or protein comprising an amino acid sequence that is at least 80% identical to any one of SEQ ID NOS: 2-6, 11-12, 24, 47-48, 71-72, 95-96, or 115; (ii) a second peptide or protein comprising an amino acid sequence that is at least 80% identical to SEQ ID NO: 1; and (iii) a neutralizing antibody against the coronavirus in the biological sample; and (c) measuring the presence or the level of the labeled complex at the test zone, wherein the presence or the level of the labeled complex formed between (i) and (iii) indicates the vaccine if effective to confer immunity in the subject against the coronavirus, and the presence or the level of the labeled complex formed between (i) and (iii) indicates the vaccine is not effective to confer immunity in the subject against the coronavirus. In some embodiments, the vaccine is allowed by a regulatory agency for the prevention of disease caused by the coronavirus. In some embodiments, the method further comprises administering a second dose of the vaccine to the subject, provided the presence or the quantity of a labeled complex formed between (i) and (iii) is measured in (c). In some embodiments, steps (a)-(c) are performed at the point of need or point of care. In some embodiments, a multiple doses of the vaccine are administered to the subject at different timepoints, and steps (a)-(c) are repeated following each dose of a multiple doses to confirming efficacy of a vaccine against the coronavirus. In some embodiments, steps (a)-(c) are performed within at least 1 month after a first dose of the vaccine. In some embodiments, steps (a)-(c) are performed within at least 2 months after a first dose of the vaccine. In some embodiments, steps (a)-(c) are performed within at least 6 months after a first dose of the vaccine. In some embodiments, steps (a)-(c) are performed within at least 12 months after a first dose of the vaccine. In some embodiments, steps (a)-(c) are performed within at least 2 years after a first dose of the vaccine. In some embodiments, steps (a)-(c) are performed within at least 4 years after a first dose of the vaccine. In some embodiments, the subject is a plurality of subjects. In some embodiments, the plurality of subjects are enrolled in a clinical trial for the vaccine. In some embodiments, the plurality of subject is not enrolled in a clinical trial for the vaccine. In some embodiments, the plurality of subject is a population of subjects. In some embodiments, the method further comprises determining the efficacy of the vaccine based, at least partially, on (c). In some embodiments, the method further comprises determining the durability of the vaccine based, at least partially, on (c). In some embodiments, the coronavirus is encoded by a nucleic acid sequence having greater than or equal to about 90% sequence identity to SEQ ID NO: 7-10, 13-20, 43, 67, or 91. In some embodiments, the coronavirus is encoded by a nucleic acid sequence having greater than or equal to about 95% sequence identity to SEQ ID NO: 7-10, 13-20, 43, 67, or 91. In some embodiments, the coronavirus is encoded by a nucleic acid sequence having greater than or equal to about 100% sequence identity to SEQ ID NO: 7-10, 13-20, 43, 67, or 91. In some embodiments, the first peptide or protein comprises an amino acid sequence that is at least 85% identical to any one of SEQ ID NOS: 2-6, 11-12, 24, 47-48, 71-72, 95-96, or 115. In some embodiments, the first peptide or protein comprises an amino acid sequence that is at least 90% identical to any one of SEQ ID NOS: 2-6, 11-12, 24, 47-48, 71-72, 95-96, or 115. In some embodiments, the first peptide or protein comprises an amino acid sequence that is at least 99% identical to any one of SEQ ID NOS: 2-6, 11-12, 24, 47-48, 71-72, 95-96, or 115. In some embodiments, the second peptide or protein comprises an amino acid sequence that is at least 85% identical to SEQ ID NO: 1. In some embodiments, the second peptide or protein comprises an amino acid sequence that is at least 90% identical to SEQ ID NO: 1. In some embodiments, the second peptide or protein comprises an amino acid sequence that is at least 99% identical to SEQ ID NO: 1. In some embodiments the vaccine is an antigenic peptide, a live-attenuated virus, a dead coronavirus, or a nucleic acid molecule encoding the antigenic peptide, or a combination thereof. In some embodiments, the subject is a mammal. In some embodiments, the mammal is a human, dog, cat, monkey, non-human primate, rodent, or a farm animal. In some embodiments, the age of the subject is at least 50 years old. In some embodiments, the biological sample is deposited on a biological sample medium. In some embodiments, the biological sample medium is a dried blood spot card.

[0027] Aspects disclosed herein provide methods of measuring vaccine-induced neutralizing antibodies against a coronavirus, the method comprising: (a) providing a biological sample obtained from a subject that was administered a dose of a vaccine against the coronavirus, wherein the coronavirus has a spike protein that comprises an amino acid sequence that is at least about 80% identical to SEQ ID NO: 2; (b) detecting, in a presence of the biological sample, an absence, a presence, or a quantity of a complex formed between: (i) a first peptide or protein comprising an amino acid sequence that is at least about 80% identical to SEQ ID NO: 1; and a second peptide or protein comprising an amino acid sequence that is at least about 80% identical to any one of SEQ ID NOS: 2-6, 11-12, 24, 47-48, 71-72, 95-96, or 115; and (c) generating a classification of the biological sample as having a presence, an absence, or a quantity of vaccine-induced neutralizing antibodies against the coronavirus based on detecting in (b). In some embodiments, the method of generating in (c) is performed by a mobile application on a personal electronic device comprising a smartphone, a tablet, or a personal computer. In some embodiments, the method further comprises: generating a prognosis of the subject based on the classification of the biological sample, wherein the prognosis is related to immunity of the subject to an infection by the coronavirus, or a disease or a condition caused by the coronavirus; or generating a measure of susceptibility of the subject to an infection by the coronavirus. In some embodiments, the method does not consist of utilizing an immortalized cell or immortalized cell culture. In some embodiments, the method further comprises confirming that the vaccine was effective to induce the vaccine-induced neutralizing antibodies against the coronavirus in the subject, provided the absence or a low quantity of the complex is detected in (b), wherein the low quantity is relative to an index or a control. In some embodiments, the method further comprises detecting, in a biological sample obtained from the subject, a presence, an absence, or a quantity of one or more antibodies against the coronavirus, wherein the one or more antibodies is not a neutralizing antibody. In some embodiments, the one or more antibodies against the coronavirus belong to a class of antibodies comprising immunoglobulin A, immunoglobulin M, or immunoglobulin G, or a combination thereof. In some embodiments, the vaccine is approved by a regulatory agency for prevention of a disease caused by the coronavirus. In some embodiments, the method further comprises administering a second dose of the vaccine to the subject, provided the presence or a high quantity of the complex is detected in (b), wherein the high quantity is relative to an index or a control. In some embodiments, the subject is a mammal. In some embodiments, the mammal is a human, dog, cat, monkey, non-human primate, rodent, or a farm animal. In some embodiments, the age of the subject is at least 50 years old. In some embodiments, the biological sample is deposited on a biological sample medium. In some embodiments, the biological sample medium is a dried blood spot card.

[0028] Aspects disclosed herein provide method of aiding in a diagnosis of a disease or condition caused by a coronavirus infection, the method comprising: (a) providing a biological sample obtained from a subject in need thereof; (b) bringing the biological sample into contact with a first peptide or protein comprising an amino acid sequence that is at least about 80% identical to SEQ ID NO: 1 and a second peptide or protein comprising an amino acid sequence that is at least about 80% identical to any one of SEQ ID NOS: 2-6, 11-12, 24, 47-48, 71-72, 95-96, or 115; (c) detecting a presence, an absence, or a quantity of a complex formed between the first peptide or protein and the second peptide or protein in a presence of the biological sample; and (d) classifying the biological sample as having a presence, an absence, or a quantity of neutralizing antibodies against a coronavirus based on detecting in (c), thereby aiding in the diagnosis of a disease or a condition caused by the coronavirus, wherein the coronavirus has a spike protein that comprises an amino acid sequence that is at least about 80% identical to SEQ ID NO: 2. In some embodiments, the classifying in (d) is performed by a mobile application on a personal electronic device comprising a smartphone, a tablet, or a personal computer. In some embodiments, the method does not consist of utilizing a cell or a cell culture. In some embodiments, the classifying in (d) comprises classifying the biological sample as having the presence or a high quantity of the neutralizing antibodies, provided the absence or a low quantity of the complex detected in (c), and wherein the low quantity is relative to an index or a control. In some embodiments, the classifying in (d) comprises classifying the biological sample as having the absence or a low quantity of the neutralizing antibodies, provided the presence or a high quantity of the complex is detected in (c), and wherein the high quantity is relative to an index or a control. In some embodiments, the method further comprises: (a) bringing a biological sample from the subject into contact with one or more capture molecules specific to an IgG antibody, an IgM antibody, or an IgA antibody against the coronavirus; and (b) detecting binding between the IgG antibody, an IgM antibody, or an IgA antibody and the one or more capture molecules. In some embodiments, the method further comprises: (a) generating a prognosis of the subject based on classifying in (d), wherein the prognosis is related to immunity of the subject against an infection by the coronavirus, or the disease or the condition caused by the coronavirus; or (b) generating a measure of susceptibility of the subject to an infection by the coronavirus. In some embodiments, the subject is a mammal. In some embodiments, the mammal is a human, dog, cat, monkey, non-human primate, rodent, or a farm animal. In some embodiments, the age of the subject is at least 50 years old. In some embodiments, the biological sample is deposited on a biological sample medium. In some embodiments, the biological sample medium is a dried blood spot card.

[0029] Aspects disclosed herein provide a system for point of need or point of care comprising: a testing device or module to detect neutralizing antibodies against a coronavirus has a spike protein that comprises an amino acid sequence that is at least about 80% identical to SEQ ID NO: 2 to aid in the diagnosis of a disease or a condition caused by the coronavirus at the point of need or the point of care, the testing device comprising: (a) a first peptide or protein comprising an amino acid sequence that is at least about 80% identical to SEQ ID NO: 1; and (b) a second peptide or protein comprising an amino acid sequence that is at least about 80% identical to any one of SEQ ID NOS: 2-6, 11-12, 24, 47-48, 71-72, 95-96, or 115, wherein the first peptide or protein or the second peptide or protein comprises a detectable moiety. In some embodiments, the system further comprises a mobile application configured to run on a personal electronic device, wherein the mobile application is configured to generate a classification of the biological sample as having a presence, an absence, or a quantity of one or more neutralizing antibodies against the coronavirus by analyzing image data from an image of the testing device at the point of need or the point of care to aid in the diagnosis of the disease or the condition caused by the coronavirus in the subject. In some embodiments, the testing device is portable. In some embodiments, the system does not consist of a cell or a cell culture. In some embodiments, the subject is a mammal. In some embodiments, the mammal is a human, dog, cat, monkey, non-human primate, rodent, or a farm animal. In some embodiments, the age of the subject is at least 50 years old. In some embodiments, the biological sample is deposited on a biological sample medium. In some embodiments, the biological sample medium is a dried blood spot card.

[0030] Aspects disclosed herein provide methods for confirming efficacy of a vaccine using a lateral flow assembly, the method comprising: (a) providing a biological sample obtained from a subject that was administered a vaccine against a coronavirus that has a spike protein comprising an amino acid sequence that is at least about 80% identical to SEQ ID NO: 2; (b) bringing the biological sample into contact with a porous membrane at a test zone of a lateral flow assay assembly adapted to detect a presence, absence, or a level of a complex coupled thereto, where the complex is formed between: (i) a first peptide or protein comprising an amino acid sequence that is at least about 80% identical to SEQ ID NO: 1; and (ii) a second peptide or protein comprising an amino acid sequence that is at least about 80% identical to any one of SEQ ID NOS: 2-6, 11-12, 24, 47-48, 71-72, 95-96, or 115; and (c) measuring the presence or a high level of the complex formed between (i) and (ii) in the presence of the biological sample at the test zone, thereby confirming that the vaccine is not effective to immunize the subject against the coronavirus; or (d) measuring the absence or a low level of the complex formed between (i) and (ii) in the presence of the biological sample at the test zone, thereby confirming that the vaccine is effective to immunize the subject against the coronavirus, wherein the high level and the low level of the complex is relative to an index or a control. In some embodiments, the vaccine is approved by a regulatory agency for prevention of a disease caused by the coronavirus. In some embodiments, steps (a)-(d) of the method are performed at a point of need or a point of care. In some embodiments, the amino acid sequence of the spike protein is at least about 95% identical to SEQ ID NO: 2. In some embodiments, the amino acid sequence of the second peptide or protein is at least about 95% identical to any one of SEQ ID NOS: 2-6, 11-12, 24, 47-48, 71-72, 95-96, or 115. In some embodiments, the method further comprises detecting, in the biological sample obtained from the subject, a presence, an absence, or a level of a second complex coupled to the porous membrane at a second test zone between a capture molecule and one or more antibodies against the coronavirus in the biological sample. In some embodiments, the one or more antibodies against the coronavirus is immunoglobulin G, immunoglobulin M, immunoglobulin A, or a combination thereof. In some embodiments, the subject is a mammal. In some embodiments, the mammal is a human, dog, cat, monkey, non-human primate, rodent, or a farm animal. In some embodiments, the age of the subject is at least 50 years old. In some embodiments, the biological sample is deposited on a biological sample medium. In some embodiments, the biological sample medium is a dried blood spot card.

[0031] Aspects disclosed herein provide systems comprising: a lateral flow assay assembly comprising: (a) a first peptide or protein comprising an amino acid sequence that is at least 80% identical to SEQ ID NO 1; (b) a second peptide or protein comprising an amino acid sequence that is at least about 80% identical to any one of SEQ ID NOS: 2-6, 11-12, 24, 47-48, 71-72, 95-96, or 115; and (c) a porous membrane having a presence or a high level of a complex coupled thereto formed between (a) and (b) in a presence of a biological sample obtained from a subject in need thereof, wherein the presence or the high level of the complex indicates an absence or a level of neutralizing antibodies against a coronavirus that has a spike protein comprising an amino acid sequence that is at least about 80% identical to SEQ ID NO: 2 in the biological sample; or (d) the porous membrane having an absence or a low level of the complex coupled thereto in the presence of the biological sample obtained from the subject in need thereof, wherein the absence or the low level of the complex indicates a presence or a level of the neutralizing antibodies against the coronavirus, wherein the low level and the high level of the complex is relative to an index or a control. In some embodiments, (a) and (b) are in a homogenous mixture that is configured to be applied to the porous membrane. In some embodiments, the system further comprises a sample receptor mechanically coupled to the porous membrane, wherein the sample receptor is configured to retain the biological sample from a subject. In some embodiments, the system is portable. In some embodiments, the system further comprises an application configured to run on a personal electronic device, wherein the application is configured to generate a classification of the biological sample as having the presence, the absence, or the level of the neutralizing antibodies against the coronavirus by analyzing image data from an image of the porous membrane of the lateral flow assay assembly. In some embodiments, the spike protein of the coronavirus comprises an amino acid sequence that is at least about 95% identical to SEQ ID NO: 2. In some embodiments, the amino acid sequence of the second peptide or protein is at least about 95% identical to any one of SEQ ID NOS: 2-6, 11-12, 24, 47-48, 71-72, 95-96, or 115. In some embodiments, the system further comprises a capture molecule coupled to the porous membrane that is specific to one or more antibodies against the coronavirus, wherein the one or more antibodies comprise an immunoglobulin G, immunoglobulin M, an immunoglobulin A, or a combination thereof. In some embodiments, the subject is a mammal. In some embodiments, the mammal is a human, dog, cat, monkey, non-human primate, rodent, or a farm animal. In some embodiments, the age of the subject is at least 50 years old. In some embodiments, the biological sample is deposited on a biological sample medium. In some embodiments, the biological sample medium is a dried blood spot card.

[0032] Aspects disclosed herein provide kits comprising: (a) a lateral flow assay assembly comprising: (i) a first peptide or protein comprising an amino acid sequence that is at least 80% identical to SEQ ID NO: 1; (ii) a second peptide or protein comprising an amino acid sequence that is at least about 80% identical to any one of SEQ ID NOS: 2-6, 11-12, 24, 47-48, 71-72, 95-96, or 115; and (iii) a porous membrane comprising a test zone having coupled thereto: (1) the first peptide or protein; (2) the second peptide or protein; or (3) a capture molecule specific to (1), (2), or a protein tag conjugated thereto; and (b) instructions for assaying a biological sample with the lateral flow assay assembly to detect a presence, an absence, or a level of neutralizing antibodies against a coronavirus that has a spike protein comprising an amino acid sequence that is at least 80% identical to SEQ ID NO: 2 in the biological sample. In some embodiments, the kit further comprises a sample receptor mechanically coupled to the porous membrane, wherein the sample receptor is configured to contain the biological sample. In some embodiments, the kit of further comprises instructions for: (a) obtaining the biological sample; (b) detecting a presence, an absence, or a level of a complex formed between the first peptide or protein and the second peptide or protein in a presence of the biological sample using the lateral flow assay assembly; and (c) classifying the biological sample as having the presence, the absence, or the level of the neutralizing antibodies against the coronavirus. In some embodiments, the kit further comprises instructions for downloading an application on a personal electronic device, wherein the application is configured to analyze image data from an image of the test zone of the lateral flow assay assembly to classify the biological sample as having the presence, the absence, or the level of neutralizing antibodies against the coronavirus. In some embodiments, the kit further comprises: (a) a second capture molecule coupled to the porous membrane that is specific to one or more antibodies against the coronavirus, wherein the one or more antibodies comprises an immunoglobulin G, an immunoglobulin M, an immunoglobulin A, or a combination thereof; and (b) instructions for: (i) detecting a presence, an absence, or a level of a second complex between the second capture molecule and the one or more antibodies against the coronavirus in the presence of the biological sample using the lateral flow assembly; and (ii) classifying the biological sample as having a presence, an absence, or a level of the one or more antibodies against the coronavirus in the biological sample based the second complex that is detected. In some embodiments, the subject is a mammal. In some embodiments, the mammal is a human, dog, cat, monkey, non-human primate, rodent, or a farm animal. In some embodiments, the age of the subject is at least 50 years old. In some embodiments, the biological sample is deposited on a biological sample medium. In some embodiments, the biological sample medium is a dried blood spot card.

[0033] Aspects disclosed herein provide methods comprising: (a) providing a biological sample from a subject that was administered a dose of a vaccine against a coronavirus that has a spike protein comprising an amino acid sequence that is at least about 80% identical to SEQ ID NO: 2, 5, 11, 48, 72, 96, or 115; (b) measuring a presence, an absence, or a level of a vaccine-induced neutralizing antibody against the coronavirus in the biological sample by: (i) contacting the biological sample with a first peptide or protein comprising an amino acid sequence that is at least about 80% identical to SEQ ID NO: 1, and a second peptide or protein comprising an amino acid sequence that is at least about 80% identical to any one of SEQ ID NOS: 2-6, 11-12, 24, 47-48, 71-72, 95-96, or 115; and (ii) detecting a presence or a level of a complex between the first peptide or protein and the second peptide or protein in a presence of the biological sample; and (c) identifying the subject as: (i) lacking sufficient immunity against the coronavirus, provided the presence or a high level of the complex is detected in (b)(ii); or (ii) having sufficient immunity against the coronavirus, provided the absence or a low level of the complex is detected in (b)(ii), wherein the high level and the low level are relative to an index or a control. In some embodiments, the method further comprises administering a second dose of the vaccine to the subject, provided the presence or the high quantity of the complex is detected in (b)(ii). In some embodiments, the vaccine is approved by a regulatory agency for prevention of a disease caused by the coronavirus. In some embodiments, the amino acid sequence of the coronavirus is at least about 95% identical to SEQ ID NO: 2. In some embodiments, the amino acid sequence of the second peptide or protein is at least about 95% identical to any one of SEQ ID NOS: 2-6, 11-12, 24, 47-48, 71-72, 95-96, or 115. In some embodiments, (a)-(c) are performed at a point of need or a point of care. In some embodiments, the method is performed without use of a cell or a cell culture. In some embodiments, the method further comprises detecting, in a biological sample obtained from the subject, a presence, an absence, or a quantity of one or more antibodies against coronavirus, wherein the one or more antibodies is not a neutralizing antibody. In some embodiments, the method is performed with a single integrated device. In some embodiments, (c) is performed by an application on a personal electronic device. In some embodiments, the subject is a mammal. In some embodiments, the mammal is a human, dog, cat, monkey, non-human primate, rodent, or a farm animal. In some embodiments, the age of the subject is at least 50 years old. In some embodiments, the biological sample is deposited on a biological sample medium. In some embodiments, the biological sample medium is a dried blood spot card.

[0034] Aspects disclosed herein provide a system comprising: (a) a first testing device or module to detect a presence, an absence, or a level of neutralizing antibodies against a coronavirus that has a spike protein comprising an amino acid sequence that is at least about 80% identical to SEQ ID NO: 2, 5, 11, 48, 72, 96, or 115, wherein the first testing device or module comprises: (i) a first peptide or protein comprising an amino acid sequence that is at least about 80% identical to SEQ ID NO: 1; (ii) a second peptide or protein comprising an amino acid sequence that is at least about 80% identical to any one of SEQ ID NOS: 2-6, 11-12, 24, 47-48, 71-72, 95-96, or 115; and (iii) a test zone for visualization of a complex between (i) and (ii); and (b) a second testing device or module to measure a presence, an absence, or a level of one or more non-neutralizing antibodies against the coronavirus, wherein the second testing device or module comprises: (i) a surface; and (ii) a detectable capture molecule coupled thereto, wherein the detectable capture molecule is specific to the one or more non-neutralizing antibodies. In some embodiments, the system further comprises an imaging device operatively coupled to the first device, wherein the imaging device is configured to capture an image of the test zone. In some embodiments, the system further comprises an imaging device operatively coupled to the second device, the imaging device configured to capture an image of the surface. In some embodiments, the imaging device comprises one or more processors configured to generate a classification of the biological sample as having the presence, the absence, or the level of the neutralizing antibodies against the coronavirus. In some embodiments, the imaging device comprises one or more processors configured to generate a second classification of the biological sample as having the presence, the absence, or the level of the presence, the absence, or the level of the one or more non-neutralizing antibodies against the coronavirus. In some embodiments, the system further comprises an application on an electronic device, the application configured to display on a graphical user interface a report comprising a classification of the biological sample, wherein the classification comprises: (a) the presence, the absence, or the level of the neutralizing antibodies against the coronavirus; or (b) the presence, the absence, or the level of the one or more non-neutralizing antibodies against the coronavirus. In some embodiments, the test zone is positioned at the surface and wherein the first peptide or protein or the second peptide or protein is coupled to the surface at the test zone directly or indirectly. In some embodiments, the first testing module and the second testing module are in a single integrated device. In some embodiments, the first testing device and the second testing device are portable. In some embodiments, the first testing device or module does not consist of a cell or a cell culture. In some embodiments, the subject is a mammal. In some embodiments, the mammal is a human, dog, cat, monkey, non-human primate, rodent, or a farm animal. In some embodiments, the age of the subject is at least 50 years old. In some embodiments, the biological sample is deposited on a biological sample medium. In some embodiments, the biological sample medium is a dried blood spot card.

[0035] Aspects disclosed herein provide systems for point of need or point of care comprising: (a) a testing device to detect neutralizing antibodies against a SARS-CoV-2 or variant thereof to aid in the diagnosis of a disease or a condition caused by SARS-CoV-2 or variant thereof, the testing device comprising: (i) a composition comprising: a first peptide or protein derived from an ACE2, or portion thereof; and a second peptide or protein derived from a spike glycoprotein of the SARS-CoV-2 or variant thereof, or portion thereof wherein at least one of the first peptide or protein and the second peptide or protein is labeled with a detectable moiety. In some embodiments, the system further comprises an application configured to run on an electronic device, the electronic device comprising a camera to capture an image of a mixture at the point of need or the point of care, wherein the application is configured to generate a classification of the biological sample as having a presence, an absence, or a quantity of neutralizing antibodies against the SARS-CoV-2 or variant thereof using image data from the image, the image data comprising a presence, an absence, or a quantity of a binding complex between the first peptide or protein and the second peptide or protein detected in the biological sample with the testing device at a point of need or point of care to aid in the diagnosis of the disease or the condition caused by SARS-CoV-2 or variant thereof. In some embodiments, the testing device of the system is portable. In some embodiments, the system does not consist of an immortalized cell or an immortalized cell culture. In some embodiments, the presence, the absence, or the quantity of neutralizing antibodies against SARS-CoV-2 or variant thereof is associated with: a prognosis related to adaptive immunity of the subject to an infection by the SARS-CoV-2 or variant thereof, or the disease or the condition caused by the SARS-CoV-2; or a measure of susceptibility of the subject to an infection by the SARS-CoV-2. In some embodiments, the electronic device of the system is a personal electronic device comprising a smartphone, a tablet, or a personal computer. In some embodiments, the subject is a mammal. In some embodiments, the mammal is a human, dog, cat, monkey, non-human primate, rodent, or a farm animal. In some embodiments, the age of the subject is at least 50 years old. In some embodiments, the biological sample is deposited on a biological sample medium. In some embodiments, the biological sample medium is a dried blood spot card.

[0036] Aspects disclosed herein provide methods for confirming a presence of vaccine-induced neutralizing antibodies against a coronavirus in a biological sample obtained from a vaccinated subject, the method comprising: (a) providing a testing device or module to detect neutralizing antibodies induced by a vaccine against a coronavirus that has a spike protein comprising an amino acid sequence that is at least about 80% identical to SEQ ID NO: 2, 5, 11, 48, 72, 96, or 115, wherein the testing device or module comprises: (i) a first peptide or protein comprising an amino acid sequence that is at least about 80% identical to SEQ ID NO: 1; and (ii) a second peptide or protein comprising an amino acid sequence that is at least about 80% identical to any one of SEQ ID NOS: 2-6, 11-12, 24, 47-48, 71-72, 95-96, or 115; and (b) measuring a presence, absence, or quantity of a complex between (i) and (ii) in the presence of the biological sample obtained from a subject who was administered a vaccine against the coronavirus with the testing device or module. In some embodiments, the method further comprises: (a) confirming of the presence or quantity of the neutralizing antibodies induced by the vaccine in the subject; or (b) identifying a risk of infection of the subject by the coronavirus, or a risk that the subject will develop a disease or a condition caused by the coronavirus. In some embodiments, the method further comprises administering to the subject a dose of the vaccine against the coronavirus before or after performing (a) and (b). In some embodiments, the testing device is a point of need or a point of care device. In some embodiments, the method does not consist of utilizing a cell or a cell culture. In some embodiments, the testing device or module is a lateral flow assay device. In some embodiments, the vaccine is approved by a regulatory agency for prevention of a disease caused by the coronavirus. In some embodiments, the amino acid sequence of the spike protein is at least about 95% identical to SEQ ID NO: 2. In some embodiments, the subject is a mammal. In some embodiments, the mammal is a human, dog, cat, monkey, non-human primate, rodent, or a farm animal. In some embodiments, the age of the subject is at least 50 years old. In some embodiments, the biological sample is deposited on a biological sample medium. In some embodiments, the biological sample medium is a dried blood spot card.

[0037] Aspects disclosed herein provide methods comprising: (a) providing a biological sample obtained from a subject in need thereof to measure a presence, an absence, or a quantity of neutralizing antibodies against a coronavirus that has a spike protein comprising an amino acid sequence that is at least about 80% identical to SEQ ID NO: 2 by: (1) contacting the biological sample with a first peptide or protein comprising an amino acid sequence that is at least about 80% identical to SEQ ID NO: 1, and a second peptide or protein comprising an amino acid sequence that is at least about 80% identical to any one of SEQ ID NOS: 2-6, 11-12, 24, 47-48, 71-72, 95-96, or 115; and

(2) detecting an absence, a presence, or a quantity of a complex formed between the first peptide or protein and the second peptide or protein in the presence of the biological sample; and (b) generating a classification of the biological sample as having a presence or a high quantity of the neutralizing antibodies against the coronavirus, provided an absence or a low quantity of the complex is detected in (2). In some embodiments, the neutralizing antibodies are induced by administration of a vaccine against the coronavirus to the subject prior to performing (a)-(b). In some embodiments, the method further comprises identifying a risk of infection of the subject by the coronavirus, or a risk that the subject will develop a disease or a condition caused by the coronavirus. In some embodiments, the vaccine is approved by a regulatory agency for prevention of a disease caused by the coronavirus. In some embodiments, the method further comprising detecting, in a biological sample obtained from the subject, a presence, an absence, or a quantity of one or more antibodies against the coronavirus comprising an immunoglobulin G, immunoglobulin M, an immunoglobulin A, or a combination thereof. In some embodiments, the subject is a mammal. In some embodiments, the mammal is a human, dog, cat, monkey, non-human primate, rodent, or a farm animal. In some embodiments, the age of the subject is at least 50 years old. In some embodiments, the biological sample is deposited on a biological sample medium. In some embodiments, the biological sample medium is a dried blood spot card.

[0038] Aspects disclosed herein provide methods of analyzing a biological sample, the method comprising: (a) providing a system comprising: (i) a first testing device or module to detect a presence, an absence, or a quantity of neutralizing antibodies against a coronavirus that has a spike protein comprising an amino acid sequence that is at least about 80% identical to SEQ ID NO: 2, wherein the first testing device or module comprises: (a) a first peptide or protein comprising an amino acid sequence that is at least about 80% identical to SEQ ID NO: 1; (b) a second peptide or protein comprising an amino acid sequence that is at least about 80% identical to any one of SEQ ID NOS: 2-6, 11-12, 24, 47-48, 71-72, 95-96, or 115; and (c) a first test zone for visualization of a complex formed between (a) and (b) in a presence of a biological sample obtained from a subject in need thereof; and (ii) a second testing device or module to detect a presence, an absence, or a quantity of one or more antibodies against the coronavirus in a biological sample obtained from the subject, wherein the second testing device or module comprises one or more capture molecules coupled to a surface at a second test zone, and wherein the one or more capture molecules is specific to the one or more antibodies; (b) detecting the presence, the absence, or the quantity of the neutralizing antibodies against the coronavirus using the first testing device or module; and (c) detecting the presence, the absence, or the quantity of at least one antibody of the one or more antibodies against the coronavirus using the second testing device or module, wherein the at least one antibody is an immunoglobulin G, an immunoglobulin M, or an immunoglobulin A. In some embodiments, the first test zone is positioned at the surface adjacent to the second test zone, and wherein the first peptide or protein is coupled to the surface at the second test zone directly or indirectly. In some embodiments, the first testing module and the second testing module are in a single integrated device. In some embodiments, wherein system is portable. In some embodiments, the neutralizing antibodies are induced by administration of a vaccine against the coronavirus to the subject prior to performing (a)-(c). In some embodiments, the vaccine is approved by a regulatory agency for prevention of a disease caused by the coronavirus. In some embodiments, the method further comprises (a) confirming the presence or the quantity of neutralizing antibodies induced by a vaccine against the coronavirus that was administered to the subject; or (b) identifying a risk of infection of the subject by the coronavirus, or a risk that the subject will develop a disease or a condition caused by the coronavirus. In some embodiments, the subject is a mammal. In some embodiments, the mammal is a human, dog, cat, monkey, non-human primate, rodent, or a farm animal. In some embodiments, the age of the subject is at least 50 years old. In some embodiments, the biological sample is deposited on a biological sample medium. In some embodiments, the biological sample medium is a dried blood spot card.

[0039] Aspects disclosed herein provide methods of measuring vaccine-induced neutralizing antibodies against a coronavirus, the method comprising: (a) providing a biological sample obtained from an animal subject that was administered a vaccine against a coronavirus, wherein the coronavirus is encoded by a nucleic acid sequence having greater than or equal to about 80% sequence identity to SEQ ID NO: 7-10, 13-20, 43, 67, or 91; (b) detecting, in the biological sample, a presence or a quantity of a labeled complex formed between at least two of: (i) a first peptide or protein comprising an amino acid sequence that is at least 80% identical to any one of SEQ ID NOS: 2-6, 11-12, 24, 47-48, 71-72, 95-96, or 115; (ii) a second peptide or protein comprising an amino acid sequence that is at least 80% identical to SEQ ID NO: 1; and (iii) a neutralizing antibody against the coronavirus in the biological sample; and (c) generating a classification of the biological sample based, at least partially, on (b) as having sufficient or insufficient vaccine-induced neutralizing antibodies to confer immunity against the coronavirus. In some embodiments, the vaccine is allowed by a regulatory agency for the prevention of disease caused by the coronavirus. In some embodiments, the method further comprises administering a second dose of the vaccine to the animal subject, provided a presence or a quantity of a labeled complex formed between (i) and (iii) is detected in (b). In some embodiments, the method further comprises administering a second dose of the vaccine to the animal subject, provided a presence or a quantity of a labeled complex formed between (i) and (iii) is detected in (b). In some embodiments, (a)-(c) are performed at the point of need or point of care. In some embodiments, (b) is performed using a lateral flow assay, agglutination assay, an enzyme-linked immunoassay, photonic ring resonance, or a combination thereof. In some embodiments, a multiple doses of the vaccine are administered to the animal subject at different timepoints, and steps (a)-(c) are repeated following each dose of a multiple doses to measure vaccine-induced neutralizing antibodies against the coronavirus. In some embodiments, steps (a)-(c) are performed within at least 1 month after a first dose of the vaccine. In some embodiments, steps (a)-(c) are performed within at least 2 months after a first dose of the vaccine. In some embodiments, steps (a)-(c) are performed within at least 6 months after a first dose of the vaccine. In some embodiments, steps (a)-(c) are performed within at least 12 months after a first dose of the vaccine. In some embodiments, steps (a)-(c) are performed within at least 2 years after a first dose of the vaccine. In some embodiments, steps (a)-(c) are performed within at least 4 years after a first dose of the vaccine. In some embodiments, the animal subject is a plurality of subjects. In some embodiments, the plurality of subject is not enrolled in a clinical trial for the vaccine. In some embodiments, the plurality of subject is a population of subjects. In some embodiments, the coronavirus is severe acute respiratory syndrome coronavirus 2 (SARS-CoV-2). In some embodiments, the method further comprises determining the efficacy of the vaccine based, at least partially, on (c). In some embodiments, the method further comprises determining the durability of the vaccine based, at least partially, on (c). In some embodiments, the coronavirus is encoded by a nucleic acid sequence having greater than or equal to about 90% sequence identity to SEQ ID NO: 7-10, 13-20, 43, 67, or 91. In some embodiments, the coronavirus is encoded by a nucleic acid sequence having greater than or equal to about 95% sequence identity to SEQ ID NO: 7-10, 13-20, 43, 67, or 91. In some embodiments, the coronavirus is encoded by a nucleic acid sequence having greater than or equal to about 100% sequence identity to SEQ ID NO: 7-10, 13-20, 43, 67, or 91. In some embodiments, the animal subject is a mammal. In some embodiments, the mammal is a human, dog, cat, monkey, non-human primate, rodent, or a farm animal. In some embodiments, the age of the subject is at least 50 years old. In some embodiments, the biological sample is deposited on a biological sample medium. In some embodiments, the biological sample medium is a dried blood spot card.

[0040] Aspects disclosed herein provide a method comprising: (a) providing a biological sample from an animal subject that was administered a vaccine against a coronavirus encoded by a nucleic acid sequence having greater than or equal to about 80% sequence identity to SEQ ID NO: 7-10, 13-20, 43, 67, or 91; (b) measuring a presence or level of a neutralizing antibody against the coronavirus in the biological sample by: (i) contacting the biological sample with a first peptide or protein comprising an amino acid sequence that is at least 80% identical to any one of SEQ ID NOS: 2-6, 11-12, 24, 47-48, 71-72, 95-96, or 115, and a second peptide or protein comprising an amino acid sequence that is at least 80% identical to SEQ ID NO: 1; and (ii) detecting a presence or a level a labeled complex between the at least two of (1) the first peptide or protein; (2) the second peptide or protein; and (3) the neutralizing antibody against the coronavirus; and (c) identifying the animal subject as having or lacking sufficient immunity against the coronavirus, wherein the presence or the level of the complex between (1) and (2) is indicative of lacking sufficient immunity and the presence or the level of the complex between (1) and (3) is indicative of having sufficient immunity. In some embodiments, the vaccine is allowed by a regulatory agency for the prevention of disease caused by the coronavirus. In some embodiments, the method further comprises administering a second dose of the vaccine to the animal subject, provided a presence or a quantity of a labeled complex formed between (i) and (iii) is detected in (b). In some embodiments, the method further comprises administering a second dose of the vaccine to the animal subject, provided a presence or a quantity of a labeled complex formed between (i) and (iii) is detected in (b). In some embodiments, (a)-(c) are performed at the point of need or point of care. In some embodiments, (b) is performed using a lateral flow assay, agglutination assay, an enzyme-linked immunoassay, photonic ring resonance, or a combination thereof. In some embodiments, a multiple doses of the vaccine are administered to the animal subject at different timepoints, and steps (a)-(c) are repeated following each dose of a multiple doses to measure vaccine-induced neutralizing antibodies against the coronavirus. In some embodiments, steps (a)-(c) are performed within at least 1 month after a first dose of the vaccine. In some embodiments, steps (a)-(c) are performed within at least 2 months after a first dose of the vaccine. In some embodiments, steps (a)-(c) are performed within at least 6 months after a first dose of the vaccine. In some embodiments, steps (a)-(c) are performed within at least 12 months after a first dose of the vaccine. In some embodiments, steps (a)-(c) are performed within at least 2 years after a first dose of the vaccine. In some embodiments, steps (a)-(c) are performed within at least 4 years after a first dose of the vaccine. In some embodiments, the animal subject is a plurality of subjects. In some embodiments, the plurality of subject is not enrolled in a clinical trial for the vaccine. In some embodiments, the plurality of subject is a population of subjects. In some embodiments, the coronavirus is severe acute respiratory syndrome coronavirus 2 (SARS-CoV-2). In some embodiments, the method further comprises determining the efficacy of the vaccine based, at least partially, on (c). In some embodiments, the method further comprises determining the durability of the vaccine based, at least partially, on (c). In some embodiments, the coronavirus is encoded by a nucleic acid sequence having greater than or equal to about 90% sequence identity to SEQ ID NO: 7-10, 13-20, 43, 67, or 91. In some embodiments, the coronavirus is encoded by a nucleic acid sequence having greater than or equal to about 95% sequence identity to SEQ ID NO: 7-10, 13-20, 43, 67, or 91. In some embodiments, the coronavirus is encoded by a nucleic acid sequence having greater than or equal to about 100% sequence identity to SEQ ID NO: 7-10, 13-20, 43, 67, or 91. In some embodiments, the animal subject is a mammal. In some embodiments, the mammal is a human, dog, cat, monkey, non-human primate, rodent, or a farm animal. In some embodiments, the age of the subject is at least 50 years old. In some embodiments, the biological sample is deposited on a biological sample medium. In some embodiments, the biological sample medium is a dried blood spot card.

[0041] Aspects disclosed herein provide systems for analyzing a biological sample, the system comprising: (a) a biological sample processor comprising: (i) a biological sample receiver configured to receive biological sample medium comprising a biological sample; and (ii) a biological sample chemical extractor configured to elute the biological sample from the biological sample medium; and (b) an assay assembly block comprises a biological sample assay conductor configured to analyze the biological sample to detect a level of neutralizing antibodies against a coronavirus that blocks binding between an S protein of a coronavirus (CoV) and Angiotensin-converting enzyme 2 (ACE2) in the biological by: (i) contacting the biological sample with (1) a first protein comprising the ACE2, or a fragment thereof, that binds to the CoV S protein, or a fragment thereof, and (2) a second protein comprising the CoV S protein, or the fragment thereof, that binds to the ACE2, or the fragment thereof, under conditions that permit binding between the ACE2 or fragment thereof, and the COV S protein or fragment thereof, to produce an ACE2-CoV S complex, wherein the first protein or the second protein is labeled directly or indirectly with a detectable moiety; (ii) detecting a signal corresponding to a level of the ACE2-CoV S complex in the biological sample wherein the signal is inversely correlated with the level of the neutralizing antibody in the biological sample; and (iii) detect the level of the neutralizing antibody in the biological sample based, at least in part, on the signal detected. In some embodiments, the system is automated or semi-automated. In some embodiments, the systems are robotized. In some embodiments, the biological sample is more than or equal to about 1000, 1500, 2000, 25000, 3000, 3500, 4000, 4500, 5000, 5500, 6000, 6500, 7000, 7500, 8000, 8500, 9000, 9500, 1000, 1500, or 20000 biological samples, wherein each of the biological samples is obtained from a different subject. In some embodiments, the system is configured to perform (a) to (b) under 1, 2, 3, 4, 5, 6, 7, 8, 9, 10, 11, or 12 hours. In some embodiments, the system is configured to perform (a) to (b) on more than or equal to about 5000 biological samples in about 8 hours. In some embodiments, the system is configured to perform (a) to (b) on more than or equal to about 20000 biological samples in about 8 hours. In some embodiments, the biological sample medium is a dried blood spot card. In some embodiments, the assay assembly block comprises a fluorescence Resonance Energy Transfer (FRET) assay assembly, or an enzyme-linked immunosorbent assay (ELISA) assembly. In some embodiments, the biological sample receiver is further configured to: (a) orient the biological sample medium; (b) optionally, scan the biological sample medium to obtain patient information; (c) optionally, store the patient information in a database; (d) separate a segment of the biological sample from the biological sample medium; (e) place segment of the biological sample in a assay chamber; or (f) optionally, scan assay chamber to ensure the segment is properly positioned in the assay chamber; or (g) a combination of (a) to (f). In some embodiments, (a) to (f) is performed by the biological sample receiver. In some embodiments, the biological sample medium is a dried blood spot card and the segment of the biological sample is punch from the dried blood spot card having diameter of about 5 millimeters. In some embodiments, the assay chamber comprises a well in a 96 well plate. In some embodiments, the biological sample chemical extractor is further configured to purify the biological sample from an elution containing the biological sample eluted from the biological sample medium. In some embodiments, the assay assembly block further comprises a biological sample diluter that is configured to serially dilute the purified biological sample into multiple dilutions for analysis. In some embodiments, the level of neutralizing antibodies against a coronavirus that blocks binding between an S protein of a coronavirus (CoV) and Angiotensin-converting enzyme 2 (ACE2) is associated with: a prognosis related to adaptive immunity of the subject to an infection by the coronavirus or variant thereof, or the disease or the condition caused by the coronavirus; or a measure of susceptibility of the subject to an infection by the coronavirus. In some embodiments, the biological sample is obtained from a subject is a mammal. In some embodiments, the mammal is a human, dog, cat, monkey, non-human primate, rodent, or a farm animal. In some embodiments, the age of the biological sample is obtained from a subject that is at least or equal to about 50, 51, 52, 53, 54, 55, 56, 57, 58, 59, 60, 61, 62, 63, 64, 65, 66, 67, 68, 69, 70, 71, 72, 73, 74, or 75 years old. In some embodiments, the CoV is Severe acute respiratory syndrome-related virus (SARS-CoV). In some embodiments, the SARS-CoV is SARS-CoV-2. In some embodiments, the biological sample assay conductor is further configured to analyze the biological sample by comparing the level of neutralizing antibodies to a control or an index, wherein the control or index is a known level of neutralizing antibodies determined by a cell-based assay. In some embodiments, the first protein and/or the second protein are in a solution, wherein in the solution having a volume of no greater than or equal to about 5, 10, 15, 20, 25, 30, 35, 40, 45, or 50 μl.

[0042] Aspects disclosed herein provide methods for analyzing a biologicals sample, the method comprising: (a) receiving biological sample medium comprising a biological sample; (b) eluting the biological sample from the biological sample medium; (c) analyzing the biological sample to detect a level of neutralizing antibodies against a coronavirus that blocks binding between an S protein of a coronavirus (CoV) and Angiotensin-converting enzyme 2 (ACE2) in the biological by: (i) contacting the biological sample with (1) a first protein comprising the ACE2, or a fragment thereof, that binds to the CoV S protein, or a fragment thereof, and (2) a second protein comprising the CoV S protein, or the fragment thereof, that binds to the ACE2, or the fragment thereof, under conditions that permit binding between the ACE2 or fragment thereof, and the COV S protein or fragment thereof, to produce an ACE2-CoV S complex, wherein the first protein or the second protein is labeled directly or indirectly with a detectable moiety; and (ii) detecting a signal corresponding to a level of the ACE2-CoV S complex in the biological sample wherein the signal is inversely correlated with the level of the neutralizing antibody in the biological sample; and (d) detect the level of the neutralizing antibody in the biological sample based, at least in part, on the signal detected. In some embodiments, steps (a) to (d) are automated or semi-automated. In some embodiments, steps (a) to (d) are performed by robots. The system of claim 53, the biological sample is more than or equal to about 1000, 1500, 2000, 25000, 3000, 3500, 4000, 4500, 5000, 5500, 6000, 6500, 7000, 7500, 8000, 8500, 9000, 9500, 1000, 1500, or 20000 biological samples, wherein each of the biological samples is obtained from a different subject. In some embodiments, (a) to (d) are performed under 1, 2, 3, 4, 5, 6, 7, 8, 9, 10, 11, or 12 hours. The method of claim 75, wherein (a) to (d) are performed on more than or equal to about 5000 biological samples in about 8 hours. In some embodiments, (a) to (d) are performed on more than or equal to about 20000 biological samples in about 8 hours. In some embodiments, the biological sample medium is a dried blood spot card. In some embodiments, the assay assembly block comprises a fluorescence Resonance Energy Transfer (FRET) assay assembly, or an enzyme-linked immunosorbent assay (ELISA) assembly. In some embodiments, the methods further comprise: (e) orienting the biological sample medium; (f) optionally, scanning the biological sample medium to obtain patient information; (g) optionally, storing the patient information in a database; (h) separating a segment of the biological sample from the biological sample medium; (i) placing the segment of the biological sample in a assay chamber; (j) optionally, scanning the assay chamber to ensure the segment is properly positioned in the assay chamber; (g) a combination of (e) to (j). In some embodiments, the methods comprise performing (e) to (k). In some embodiments, the biological sample medium is a dried blood spot card and the segment of the biological sample is punch from the dried blood spot card having diameter of about 5 millimeters. In some embodiments, the assay chamber comprises a well in a 96 well plate. In some embodiments, the methods further comprise purifying the biological sample from an elution containing the biological sample eluted from the biological sample medium. In some embodiments, the methods further comprise serially dilute the purified biological sample into multiple dilutions for analysis. In some embodiments, the level of neutralizing antibodies against a coronavirus that blocks binding between an S protein of a coronavirus (CoV) and Angiotensin-converting enzyme 2 (ACE2) is associated with: a prognosis related to adaptive immunity of the subject to an infection by the coronavirus or variant thereof, or the disease or the condition caused by the coronavirus; or a measure of susceptibility of the subject to an infection by the coronavirus. In some embodiments, the biological sample is obtained from subject that is a mammal. In some embodiments, the mammal is a human, dog, cat, monkey, non-human primate, rodent, or a farm animal. In some embodiments, the age of the subject is at least or equal to about 50, 51, 52, 53, 54, 55, 56, 57, 58, 59, 60, 61, 62, 63, 64, 65, 66, 67, 68, 69, 70, 71, 72, 73, 74, or 75 years old. In some embodiments, the CoV is Severe acute respiratory syndrome-related virus (SARS-CoV). In some embodiments, the SARS-CoV is SARS-CoV-2. In some embodiments, In some embodiments, analyzing the biological sample further comprises comparing the level of neutralizing antibodies to a control or an index, wherein the control or index is a known level of neutralizing antibodies determined by a cell-based assay. In some embodiments, the first protein and/or the second protein are in a solution, wherein in the solution having a volume of no greater than or equal to about 5, 10, 15, 20, 25, 30, 35, 40, 45, or 50 μl.

### INCORPORATION BY REFERENCE

[0043] All publications, patents, and patent applications mentioned in this specification are herein incorporated by reference to the same extent as if each individual publication, patent, or patent application was specifically and individually indicated to be incorporated by reference.

### BRIEF DESCRIPTION OF THE DRAWINGS

[0044] The novel features of the invention are set forth with particularity in the appended claims. A better understanding of the features and advantages of the present invention will be obtained by reference to the following detailed description that sets forth illustrative embodiments, in which the principles of the invention are utilized, and the accompanying drawings of which:

[0045] FIG. 1 shows an exemplary assay measuring binding between an immobilized human angiotensin-converting enzyme 2 (ACE2) receptor and a peptide-conjugate derived from a spike glycoprotein of a SARS-CoV-2 in a biological sample obtained from a patient that has not been exposed to SARS-CoV-2.

[0046] FIG. 2 shows an exemplary assay measuring binding between an immobilized human ACE2 receptor and a peptide-conjugate derived from the spike glycoprotein of SARS-CoV-2 in a biological sample obtained from a patient exposed to SARS-CoV-2.

[0047] FIG. 3 shows an exemplary lateral flow assay to measure binding between human ACE2 receptor and a peptide-conjugate derived from the spike glycoprotein of SARS-CoV-2 in a biological sample obtained from a patient that has not been exposed to SARS-CoV-2.

[0048] FIG. 4 shows an exemplary lateral flow assay to measure binding between human ACE2 receptor and a peptide-conjugate derived from the spike glycoprotein of SARS-CoV-2 in a biological sample obtained from a patient that was exposed to SARS-CoV-2.

[0049] FIG. 5 shows an exemplary system according to some embodiments.

[0050] FIG. 6 shows a computing device; in this case, a device with one or more processors, memory, storage, and a network interface, in accordance with some embodiments.

[0051] FIG. 7 shows an exemplary assay in FIG. 2 in an image-free system; results from the exemplary assay is visible and can be interpreted by the naked eye.

[0052] FIG. 8A-8D shows an exemplary assay assembly to measure inhibition of binding between the receptor binding domain (RBD) of SARS-CoV-2 and its cognate receptor, ACE2. FIG. 8A illustrates assay with a first RBD (RBD1) with a patient sample that does not contain neutralizing antibodies that functionally inhibit RBD1-ACE2 binding. FIG. 8B shows the same assay from FIG. 8A with a patient sample that contains neutralizing antibodies that functionally inhibit RBD1-ACE2 binding. FIG. 8C shows a neutralization assay that measures a presence of neutralizing antibodies against at least two different RBD peptides (RBD1 and RBD2) in the absence of neutralizing antibodies (FIG. 8C) and in the presence of neutralizing antibodies (FIG. 8D).

[0053] FIG. 9A-9D illustrate that the assay assembly from FIG. 8A-8D may be performed in solution (e.g., not on a solid surface) using fluorescence resonance energy transfer (FRET). FIG. 9A shows electron transfer between the donor fluorophore and the acceptor fluorophore, indicating an absence of neutralizing antibodies that block binding between RBD and ACE2.

[0054] FIG. 9B shows no electron transfer between the donor fluorophore and the acceptor fluorophore, indicating a presence of neutralizing antibodies that block binding between RBD.

[0055] FIG. 9C shows a neutralization assay in solution in which electron transfer occurs between two different donor fluorophore and the acceptor fluorophore pairs, indicating an absence of neutralizing antibodies that block binding between first RBD, RBD1, and second RBD, RBD2.

[0056] FIG. 9D shows a neutralization assay in solution in which no electron transfer occurs between two different donor fluorophore and the acceptor fluorophore pairs, indicating a presence of neutralizing antibodies that block binding between RBD1 and RBD2.

[0057] FIG. 10A-10E illustrate homogenous solution with reaction components, where the homogenous solution is applied to a surface with surface-bound capture molecules. FIG. 10A illustrates a homogenous solution comprising the reaction components of FIG. 8A being applied to surface-bound capture molecules of FIG. 8A. The capture molecule captures an epitope tag conjugated to RBD, which forms a complex with ACE2 conjugated to the detective moiety. FIG. 10B illustrates a homogenous solution comprising reaction components being applied to surface-bound capture molecules of FIG. 8A. The capture molecule captures an epitope tag conjugated to ACE2, which forms a complex with RBD conjugated to the detective moiety. FIG. 10C illustrates a homogenous solution comprising the reaction components of FIG. 8B being applied to surface-bound capture molecules of FIG. 8B. FIG. 10D illustrates a homogenous solution comprising the reaction components of FIG. 8C being applied to surface-bound capture molecules of FIG. 8C. FIG. 10E illustrates a homogenous solution comprising the reaction components of FIG. 8D being applied to surface-bound capture molecules of FIG. 8D.

[0058] FIG. 11A illustrates two vaccines having different levels of efficacy in a population of individuals, and the risks and benefits associated therewith. FIG. 11B illustrates that the methods provided herein, in some embodiments, can reduce or remove the risk associated with usage of a commercialized vaccine.

[0059] FIG. 12A-12C illustrate a biological sample medium (BSM) capable of storing one or more biological samples in both a closed (FIG. 12A) and open (FIG. 12B) configuration. FIG. 12C illustrates a survey printed on the BSM.

[0060] FIG. 13 illustrates a system according to some embodiments disclosed herein.

[0061] FIG. 14 illustrates a workflow of the automated systems disclosed herein according to some embodiments.

[0062] FIG. 15 shows results neutralizing antibody inhibition of SARS-CoV-2 S1 binding to ACE2 from a time-resolved fluorescence resonance energy transfer (TR-FRET) assay run on 384 well plate (left) and a 1536 well plate (right).

### DETAILED DESCRIPTION

[0063] The inventors of the instant disclosure discovered an urgent and unmet need for a confirmatory diagnostic test that determines whether an allowed or approved vaccine for the treatment of a disease caused by SARS-CoV-2 is effective to confer adaptive immunity against SARS-CoV-2 outside the clinical trial context. The inventors also discovered that existing tests for antibodies against SARS-CoV-2 fail to measure the functional inhibition (e.g., blocking) of binding between the spike protein and its cognate receptor (ACE2), which mediates infection by SARS-CoV-2. This means that existing tests are not able to determine whether a subject has sufficient adaptive immunity against SARS-CoV-2 induced by the vaccine following vaccine administration.

[0064] To address this urgent need, the inventors of the instant disclosure developed a neutralizing antibody test that measures the functional inhibition between the spike protein and ACE2, which can be used to determine whether a vaccine is effective to confer an adaptive immune response sufficient to protect a subject from a future infection. The neutralizing antibody tests described herein can also be used to measure the durability of a vaccine over time following a prior administration of the vaccine, which indicates whether a booster of the vaccine may be needed. The neutralizing antibody tests described herein can be used to screen a population of individuals. The neutralizing antibody tests described herein can be used to identify individuals in a population that respond to a vaccine and individuals in a population that do not respond to a vaccine. The neutralizing antibody tests described herein can be used to minimize or reduce the risk associated with vaccine that has been commercialized for usage in a population (e.g., by identifying individuals that do not respond to the vaccine). The neutralizing antibody tests described herein can provide a surrogate marker of protection from a vaccine. The neutralizing antibody tests described herein can be used to classify vaccines by % efficacy in a population. With over 300 million people in the United States alone in need of vaccination, the neutralizing antibody tests described herein are both scalable and cost-efficient.

[0065] Patients recovered from COVID-19 cannot be assumed to be at low risk for rebound or re-infection, because many patients recovered from COVID-19 in several recent studies were found to never produce neutralizing antibodies against the spike protein. This is true even if the patient is given a vaccine against SARS-CoV-2. Thus, there exists a need for at testing device and systems for measuring sufficient neutralizing antibodies against SARS-CoV-2 in a patient sample conferring adaptive immunity in the patient. With over 300 million individuals in need of vaccination in the United States alone, these testing devices and systems must be scalable, cost-effective, and accessible at the point of need or point of care.

[0066] Existing SARS-CoV-2 tests marketed to aid in the diagnosis of COVID-19 at best measure exposure to SARS-CoV-2. Further, existing SARS-CoV-2 tests cannot predict severity of COVID-19 in a subject upon reinfection by SARS-CoV-2. For example, existing tests that detect a presence of antibodies against SARS-CoV-2 in a patient sample cannot discriminate neutralizing antibodies against SARS-CoV-2 and non-neutralizing antibodies. A “neutralizing antibody to SARS-CoV-2” as used herein, refers to an antibody that, when bound to the spike protein of SARS-CoV-2, prevents binding between the spike protein and its cognate receptor, ACE2. Further, existing SARS-CoV-2 tests that detect a presence of antibodies against SARS-CoV-2 lack specificity because they cannot assess the amount of cross reactivity between the antibodies in a patient sample and SARS-CoV-2 versus more benign (e.g., seasonal) coronaviruses. Although SARS-CoV-2 tests that detect binding between an antibody in a patient sample and the spike protein exist, they do not necessarily indicate when a sufficient adaptive immune response to SARS-CoV-2 has occurred. Even direct antibody binding to the receptor binding domain of the spike protein does not always inhibit viral entry into a cell initiating an infection.

[0067] The gold standard test for assessing clinical immunity to a virus utilizes a cell-based assay. The cell-based assay quantitatively measures neutralizing antibody titers in patient sera by adding patient serum and a solution containing the virus to viral-susceptible cells, and analyzing the cells to determine if the virus can no longer infect the cells. In this cell-based assay, a reduction in viral induced cytotoxicity is a measure of neutralization activity in the sera. The strength of neutralization is reported in two ways: (i) the IC50 (e.g., half the cells are killed) or (ii) highest dilution at which neutralization activity disappears. This cell-based assay has limited clinical utility, because it is difficult to scale up, is cost and time intensive, and require technical training to perform. The inability to scale these cell-based assays means clinical utility for larger populations of individuals is limited. The time, cost, and technical expertise required means clinical utility of cell-based assay at the point of need is limited. Accordingly, there is an urgent need for a scalable assay that can also be used at the point of need to measure clinical immunity.

[0068] By contrast, the testing devices and systems described herein directly detect the functional inhibition of binding between the receptor binding domain of the spike protein and its cognate receptor (e.g., ACE2) by neutralizing antibodies in a patient sample. In this manner, the devices and systems described herein have increased specificity to neutralizing antibodies to SARS-CoV-2, because they can (i) discriminate neutralizing antibodies from non-neutralizing antibodies, and (ii) assess cross reactivity between antibodies in the patient sample and benign coronaviruses. The testing devices and systems described herein are designed to indicate when a sufficient adaptive immune response to SARS-CoV-2 has occurred, by detecting the functional inhibition of binding between ACE2 and the spike protein when in a presence of antibodies in a patient sample. Testing devices and systems described herein are portable, do not require technical expertise to use or perform, and are far less costly than the gold standard test (e.g., cell-based assay) for assessing clinical immunity. For at least these reasons, the devices and systems described herein are an ideal test at the point of need.

[0069] The testing devices and systems described herein are easily scalable, at least because the testing device (i) has an assay assembly that is simple (e.g., lateral flow, solution, or solid phase capture), (ii) does not require complex imaging devices, like for e.g., BioTek® Cytation plate reader, and (iii) does not require use of a cell (or cell line). In some embodiments, the testing device is manufactured before the discovery of a new strain of virus. Upon discovery of the new strain, the assay assembly of the testing device is modified by replacing one component of the assay assembly (e.g., the recombinant RBD peptide unique to the new strain of SARS-CoV). In some embodiments, the new strain may comprise one or more mutations to SEQ ID NO: 5. In some embodiments, the new strain may comprise 1, 2, 3, 4, 5, 6, 7, 8, 9, 10, 11, 12, 13, 14, 15, 16, 17, 18, 19, 20, 21, 22, 23, 24, or 25 or more of the mutations to SEQ ID NO: 5 listed in Table 1. In some embodiments, the assay assembly is configured for centralized and automated processing, enabling high throughput performance with significantly lower reagent amounts. Methods of utilizing the testing devices and systems described herein, in some cases, leverage robotics or other means of automation that can perform upwards of 60,000 tests per day using less than one-quarter of the reagents required for existing tests.

[0070] The high throughput systems and methods for analyzing a biological sample described herein may analyze more than one biological sample (e.g., hundreds or thousands of biological samples) in a single day. In some embodiments, the high throughput performance may include between about 5,000 to about 20,000 unique processed biological samples every 8 hours. In some embodiments, the high throughput performance may be achieved by utilizing a biological sample medium (BSM) 1201, as shown in FIG. 12A-12B, which contains a biological sample obtained from a subject (e.g., a finger prick) and, in some embodiments, integrates the biological sample into an automated or semi-automated system for sample processing and assaying the biological sample. In some embodiments, the BSM may be a dried blood spot card (DBS). The automated or semi-automated systems described herein, automate sample processing, sample elution, sample preparation for assaying, and/or assaying the biological sample (e.g., without a need for an operator).

[0071] In some embodiments, as shown in FIG. 13, the automated or semi-automated systems 1300 described herein comprise a biological sample processor 1302 and an assay assembly block 1309. In some embodiments, the biological sample processor 1302 of the automated or semi-automated systems 1300 provided in FIG. 13 are configured to receive the biological sample, scan the biological sample (e.g., barcode on BSM) to register information regarding the origin of the biological sample (e.g., patient identifying information), separate a segment of the biological sample (e.g., a hole punch segment of the BSM containing the biological sample), place the segment of the biological sample into a vessel (e.g., a well), image the vessel to ensure that the segment of the biological sample is correctly placed into the vessel, extract the biological sample from the BSM, and/or purify the biological sample. In some embodiments, the assay assembly block 1309 of the automated or semi-automated systems 1300 provided in FIG. 13 are configured to dilute the optionally purified sample into serial dilutions (e.g., dilutions of 1:20, 1:160, 1:320, 1:640 sample to solution), and/or conduct the assay (e.g., FRET, ELISA) disclosed herein on the serial dilutions, to yield the assay results 1312.

[0072] In addition to directly detecting the functional inhibition of binding between the receptor binding domain of the spike protein and its cognate receptor (e.g., ACE2) by neutralizing antibodies in a patient sample, the testing devices described herein measure a presence or quantity of all antibodies (e.g., neutralizing or otherwise) against the pathogen (e.g., SARS-CoV-2) that are unique to a subject. In some embodiments, the testing devices differentiate between antibody classes, such as immunoglobulin G (IgG) and immunoglobulin M (IgM). In some embodiments, a presence or a quantity of IgG, IgM, or a combination thereof, in a patient sample is indicative of an acute infection. Thus, the testing device described herein can determine whether a subject is suffering from an acute infection by the pathogen (e.g., SARS-CoV-2), and whether the subject has developed a sufficient adaptive immunity to the pathogen such that they are immune from a future infection. The testing devices and systems described here are capable of adapting to rapidly evolving viral outbreaks in a manner that is considerably faster than existing technologies. In some embodiments, the testing devices test for more than one strain of a virus. For example, the testing devices and systems described herein are capable of identifying whether an individual is immune to human 2002-2003 and 2003-2004 SARS-CoV, with S proteins corresponding to GenBank accession no. AY274119 and GenBank accession no. AY525636, respectively. The testing devices and systems, in some embodiments, utilize recombinant RBD peptides that each have a different epitope region unique to the strain of SARS-CoV. Proper epitope presentation is accomplished by engineering the recombinant peptides to exhibit the same tertiary and quatemary structures as the corresponding pathogenic virus.

[0073] Provided herein are testing devices and systems for measuring adaptive immunity to a pathogen in a subject. In some embodiments, the testing devices are point of need or point of care devices. In some embodiments, the testing devices are configured to perform an assay on a biological sample of the subject to detect sufficient antibody titers to confer adaptive immunity to a pathogen of interest in the subject.

[0074] The biological sample includes cell, tissue, or bodily fluid obtained from the subject. Non-limiting examples of biological samples include aqueous humour, vitreous humour, bile, breast milk, cerebrospinal fluid, endolymph, perilymph, female ejaculate, amniotic fluid, gastric juice, menses, mucus, peritoneal fluid, pleural fluid, saliva, sebum, semen, sweat, tears, vaginal secretion, vomit, urine, feces, whole blood, blood serum, blood plasma, sputum, cerebrospinal fluid, synovial fluid, lymphatic fluid, nasal swab, or cheek swab. In some embodiments, the biological sample comprises blood, urine, saliva, or feces. In some embodiments, the blood is capillary blood. In some embodiments, the capillary blood is obtained by a finger prick. In some embodiments, the capillary blood sample comprises 1, 2, 3, 4, 5, 6, 7, 8, 9, 10, 11, 12, 13, 14, 15, 16, 17, 18, 19, or 20 drops of blood. In some embodiments, the capillary blood sample comprises a volume of blood less than 100, 95, 90, 85, 80, 75, 70, 65, 60, 55, 50, 45, 40, 35, 30, 25, 20, 15, 10, 9, 8, 7, 6, 5, 4, 3, 2, or 1 μL. In a non-limiting example, the subject pricks a finger, obtains a drop of blood from the finger prick, and places the drop of blood on a blood card to be stored. The subject may do this 3-4 times for the same blood card. The subject mails the blood card to the laboratory for processing.

[0075] In some embodiments, the assay is a competition assay comprising one or more capture molecules, optionally coupled to a surface, and a detectable peptide-conjugate. In some embodiments, a signal from the detectable peptide-conjugate is detected by capturing an image of a detection zone of the device by an imaging device. In some embodiments, the imaging device is a smartphone. In some embodiments, the assay is a lateral flow assay (LFA). In some embodiments, the pathogen of interest is severe acute respiratory syndrome coronavirus 2 (SARS-CoV-2).

[0076] In some embodiments, the detectable peptide-conjugate comprises a peptide derived from a spike glycoprotein of a coronavirus, and the one or more capture molecules is derived from an angiotensin-converting enzyme 2 (ACE2) receptor, or a surrogate thereof (e.g., heparin or a fragment thereof). In some cases, the detectable peptide-conjugate comprises a peptide derived from the ACE2 receptor, and the one or more capture molecules is derived from the spike glycoprotein of a coronavirus. In some embodiments, the coronavirus is a severe acute respiratory syndrome coronavirus (SARS-CoV). In some embodiments, the SARS-CoV is SARS-CoV-2. In some embodiments, the ACE2 receptor is derived from a human ACE2 receptor. In some embodiments, more than one detectable peptide-conjugate is utilized to measure neutralizing antibodies against more than one strain of SARS-CoV.

[0077] Systems described herein comprise the testing device and the imaging device. In some embodiments, systems further comprise a computing device with an application (e.g., web or mobile) comprising a data analytics module for receiving an analyzing data from the imaging device to provide a result. In some embodiments, the imaging device is the computing device (e.g., smartphone). In some embodiments, the imaging device is not the computing device. In some embodiments, the result is a positive result indicating that a subject is immune to an infection by the pathogen. In some embodiments, the result is a negative result indicating that the subject is not immune to an infection by the pathogen. In some embodiments, the application further comprises a communication module configured to display via a graphical user interface (GUI) one or more results to a user. In some embodiments, systems comprise a data store configured to store and retrieve data from the imaging device, the external device, or both.

[0078] In some embodiments, systems comprise an external device, such as a wearable tracking device (e.g., Aurora®, Fitbit®, Apple Watch). In some embodiments, the data analytics module receives and analyzes external data from the external device. In some embodiments, external data comprise body temperature, heart rate, heart rate variability, sleep quality, or sleep quantify of the subject. In some embodiments, data analytics module is configured to analyze the external data in combination with the data received from the imaging device to identify the subject as being infected with a specific pathogen.

[0079] In some embodiments, systems described herein comprise multiple users with multiple computing devices. Within a geographical location of interest, systems described herein are designed to determine whether a population of users has become immune to an infection by the pathogen (e.g., SARS-CoV-2). In some instances, global position system (GPS) tracking of the personal computing device, the imaging devices, or both, can be used to produce a geofence surrounding the geographical location of interest.

### Testing Devices and Systems

[0080] Disclosed herein, in some embodiments, are testing devices that can be deployed at the point of need to determine whether a patient is immune to an infection by the pathogen. In some embodiments, devices comprise an assay assembly capable of assaying a biological sample obtained from the patient. In some embodiments, the testing devices comprise one or more components, such as a housing, a sample receiver, a sample processor, a sample purifier, or a detection zone. In some embodiments, the testing systems described herein comprise one or more testing devices described herein and a biological sample medium (BSM) that stores the biological sample. In some embodiments, the one or more components of the testing devices or systems described herein elutes the biological sample from the BSM prior to assaying the sample using the assay assembly of the testing device or system.

### Assay Assembly

[0081] Disclosed herein, in some embodiments are devices comprising an assay assembly that is capable of detecting a target analyte. In some embodiments, the target analyte is an antibody specific to a pathogen of interest. In some embodiments, the antibody specific to the pathogen of interest functionally blocks binding between the pathogen to its cognate receptor (e.g., a “neutralizing antibody”). In some embodiments, the neutralizing antibody is elicited in a subject by a vaccine or an infection by the pathogen. In some embodiments, the testing devices comprise two assay assemblies, the first assay assembly capable of detecting an antibody specific to a pathogen of interest, and the second assay assembly capable of detecting a neutralizing antibody that functionally blocks binding between the pathogen and its cognate (host) receptor. In some embodiments, the target analyte is a biomarker. It is contemplated that any combination of assay assemblies described herein may be used in combination, depending on the desired result. In some embodiments, the combination is housed in a single testing device. In some embodiments, the combination is housed in more than one testing device.

[0082] In some embodiments, the pathogen comprises a virus, a bacteria, a parasite, a fungus, or a combination thereof. In some embodiments, the virus is a coronavirus. In some embodiments, the coronavirus is a severe acute respiratory syndrome coronavirus (SARS-CoV). In some embodiments, the SARS-CoV is SARS-CoV-2. In some embodiments, the coronavirus is Middle East Respiratory Syndrome coronavirus (MERS-CoV). In some embodiments, the coronavirus is an alpha coronavirus (e.g., 229E, NL63). In some embodiments, the coronavirus is a beta coronavirus (e.g., OC43, HKU1). In some embodiments, the coronavirus comprises a protein having an amino acid sequence with greater than or equal to about 70%, 75%, 80%, 85%, 86%, 87%, 88%, 89%, 90%, 91%, 92%, 93%, 94%, 95%, 96%, 97%, 98%, 99%, or 100% sequence identity to one or more sequences, or portions thereof, provided in SEQ ID NOS: 1-116. In some embodiments, the coronavirus comprises a protein having an amino acid sequence with greater than or equal to about 70%, 75%, 80%, 85%, 86%, 87%, 88%, 89%, 90%, 91%, 92%, 93%, 94%, 95%, 96%, 97%, 98%, 99%, or 100% sequence identity to SEQ ID NO: 2, or a portion thereof. In some embodiments, the coronavirus comprises a protein having an amino acid sequence with greater than or equal to about 70%, 75%, 80%, 85%, 86%, 87%, 88%, 89%, 90%, 91%, 92%, 93%, 94%, 95%, 96%, 97%, 98%, 99%, or 100% sequence identity to SEQ ID NO: 3, or a portion thereof. In some embodiments, the coronavirus comprises a protein having an amino acid sequence with greater than or equal to about 70%, 75%, 80%, 85%, 86%, 87%, 88%, 89%, 90%, 91%, 92%, 93%, 94%, 95%, 96%, 97%, 98%, 99%, or 100% sequence identity to SEQ ID NO: 4, or a portion thereof. In some embodiments, the coronavirus comprises a protein having an amino acid sequence with greater than or equal to about 70%, 75%, 80%, 85%, 86%, 87%, 88%, 89%, 90%, 91%, 92%, 93%, 94%, 95%, 96%, 97%, 98%, 99%, or 100% sequence identity to SEQ ID NO: 5, or a portion thereof. In some embodiments, the coronavirus comprises a protein having an amino acid sequence with 1, 2, 3, 4, 5, 6, 7, 8, 9, 10, 11, 12, 13, 14, 15, 16, 17, 18, 19, 20, 21, 22, 23, 24, or 25 or more of the mutations to SEQ ID NO: 5 listed in Table 1. In some embodiments, the coronavirus comprises a protein having an amino acid sequence with greater than or equal to about 70%, 75%, 80%, 85%, 86%, 87%, 88%, 89%, 90%, 91%, 92%, 93%, 94%, 95%, 96%, 97%, 98%, 99%, or 100% sequence identity to SEQ ID NO: 6, or a portion thereof. In some embodiments, the coronavirus comprises a protein having an amino acid sequence with greater than or equal to about 70%, 75%, 80%, 85%, 86%, 87%, 88%, 89%, 90%, 91%, 92%, 93%, 94%, 95%, 96%, 97%, 98%, 99%, or 100% sequence identity to SEQ ID NO: 11, or a portion thereof. In some embodiments, the coronavirus comprises a protein having an amino acid sequence with greater than or equal to about 70%, 75%, 80%, 85%, 86%, 87%, 88%, 89%, 90%, 91%, 92%, 93%, 94%, 95%, 96%, 97%, 98%, 99%, or 100% sequence identity to SEQ ID NO: 12, or a portion thereof. In some embodiments, the coronavirus comprises a protein having an amino acid sequence with greater than or equal to about 70%, 75%, 80%, 85%, 86%, 87%, 88%, 89%, 90%, 91%, 92%, 93%, 94%, 95%, 96%, 97%, 98%, 99%, or 100% sequence identity to SEQ ID NO: 24, 47-48, 71-72, 95-96, or 115, or a portion thereof. In some embodiments, the coronavirus comprises a viral genome comprising a sequence that is greater than or equal to about 70%, 75%, 80%, 85%, 86%, 87%, 88%, 89%, 90%, 91%, 92%, 93%, 94%, 95%, 96%, 97%, 98%, 99%, or 100% sequence identity to SEQ ID NO: 7-10, 13-20, 43, 67, or 91, or a portion thereof.

[0083] In some embodiments, the pathogen of interest is a variant of the pathogen, for example, a pathogen that has evolved through mutations in the genes encoding the pathogen. In the case of a virus, the variant virus may have a mutation in an amino acid sequence of a viral protein, such as an envelope protein, nucleocapsid protein, membrane protein, hemaggluitinin, neuraminidase, or spike protein. In some embodiments, the virus (e.g., coronavirus) comprises a mutation in one or more of the sequences provided in SEQ ID NOS: 1-116. In some embodiments, the mutation does not affect, or minimally affects, host receptor binding by the spike protein of the coronavirus. In some embodiments, the mutation is an insertion, a deletion, or a substitution at an amino acid (or a plurality of amino acids) of one or more sequences provided in SEQ ID NOS: 1-116 for coronaviruses (e.g., SARS, SARS-CoV, and NL63). In some embodiments, the Non-limiting examples of mutations in an amino acid sequence of the spike protein of SARS-CoV-2 (SEQ ID NO: 5) are provided in Long et al., Molecular Architecture of Early Dissemination and Massive Second Wave of the SARS-CoV-2 Virus in a Major Metropolitan Area, Am. Soc. M. Bio., 11:6 (November/December 2020) e02707-20, which is hereby incorporated by reference in its entirety. In some embodiments, the variant of SARS-CoV-2 comprises a spike protein having an amino acid sequence comprising a substitution of an aspartic acid (Asp) to a glycine (Gly) at amino acid position 614 (Asp614Gly) with reference to SEQ ID NO: 5 (SARS-CoV-2). In some embodiments, the variant of SARS-CoV-2 comprises a spike protein having an amino acid sequence comprising one or more substitution selected from Ala442Val, Ala448Val, Ala553Pro or Val, Gly682Arg, Ser758Pro, and Cys812Phe, with reference to SEQ ID NO: 5 (SARS-CoV-2).

[0084] In some embodiments, the antibody specific to coronavirus is specific to the receptor binding domain of the spike protein of the coronavirus, such that the antibody blocks binding of the spike protein to its cognate receptor (e.g., ACE2). In some embodiments, the analyte is a complex comprising the spike protein bound to the antibody at the receptor binding region of the spike protein. In some embodiments, the antibody specific to the pathogen of interest belongs to an immunoglobulin class comprising immunoglobulin M, immunoglobulin G, immunoglobulin A, immunoglobulin E, or immunoglobulin D.

[0085] In some embodiments, the target analyte (or second target analyte) is a biomarker. In some embodiments, the assay assembly is configured to detect at least one, two, three, four, five, 10, 20, 30, 40, 50, 60, 70, 80, 90, 100, 200, 500, 1,000 or more biomarkers in the biological sample. In some embodiments, the biomarker comprises a non-peptide coding nucleic acid sequence. In some embodiments, the biomarker comprise a peptide coding nucleic acid sequence such as mRNA or cDNA. In some embodiments, the biomarker comprises a peptide or a protein.

[0086] In some embodiments, the biomarker is derived from the pathogen of interest (e.g., coronavirus). In some embodiments, the assay assembly is adapted to detect a region of the pathogen of interest. In some embodiments, the biomarker comprises orf1a, orf1ab, spike protein (S protein), 3a, 3b, envelope protein (E protein), matrix protein (M protein), p6, 7a, 7b, 8b, 9b, nucleocapsid protein (N protein), orf14, nsp1 (leader protein), nsp2, nsp3, nsp4, nsp5 (3C-like proteinase), nsp6, nsp7, nsp8, nsp9, nsp10 (growth-factor-like protein), nsp12 (RNA-dependent RNA polymerase, or RdRp), nsp13 (RNA 5′-triphosphatase), nsp14 (3′-to-5′ exonuclease), nsp15 (endoRNAse), and nsp16 (2′-O-ribose methyltransferase), a portion thereof, or combinations thereof.

[0087] In some embodiments, the biomarker is a proinflammatory marker. In some embodiments, the proinflammatory marker comprises 4-1BBL, acylation stimulating protein, adipokine, albinterferon, APRIL, Arh, BAFF, Bcl-6, CCL1, CCL1/TCA3, CCL1, CCL12/MCP-5, CCL13/MCP-4, CCL14, CCL15, CCL16, CCL17/TARC, CCL18, CCL19, CCL2, CCL2/MCP-1, CCL20, CCL21, CCL22/MDC, CCL23, CCL24, CCL25, CCL26, CCL27, CCL28, CCL3, CCL3L3, CCL4, CCL4L1/LAG-1, CCL5, CCL6, CCL7, CCL8, CCL9, CCR10, CCR3, CCR4, CCR5, CCR6, CCR7, CCR8, CD153, CD154, CD178, CD40LG, CD70, CD95L/CD178, Cerberus (protein), chemokines, CLCF1, CNTF, colony-stimulating factor, common b chain (CD131), common g chain (CD132), CX3CL1, CX3CR1, CXCL1, CXCL10, CXCL11, CXCL12, CXCL13, CXCL14, CXCL15, CXCL16, CXCL17, CXCL2, CXCL2/MIP-2, CXCL3, CXCL4, CXCL5, CXCL6, CXCL7, CXCL9, CXCR3, CXCR4, CXCR5, EDA-A1, Epo, erythropoietin, FAM19A1, FAM19A2, FAM19A3, FAM19A4, FAM19A5, Flt-3L, FMS-like tyrosine kinase 3 ligand, Foxp3, GATA-3, GcMAF, G-CSF, GITRL, GM-CSF, granulocyte colony-stimulating factor, granulocyte-macrophage colony-stimulating factor, hepatocyte growth factor, IFNA1, IFNA10, IFNA13, IFNA14, IFNA2, IFNA4, IFNA5/IFNaG, IFNA7, IFNA8, IFNB1, IFNE, IFNG, IFNZ, IFN-α, IFN-β, IFN-γ, IFNω/IFNW1, IL-1, IL-10, IL-10 family, IL-10-like, IL-11, IL-12, IL-13, IL-14, IL-15, IL-16, IL-17, IL-17A-F, IL-18, IL-18BP, IL-19, IL-IA, IL-1B, IL-1F10, IL-1F3/IL-1RA, IL-1F5, IL-1F6, IL-1F7, IL-1F8, IL-1F9, IL-1-like, IL-1RA, IL-1RL2, IL-1α, IL-1β, IL-2, IL-20, IL-21, IL-22, IL-23, IL-24, IL-28A, IL-28B, IL-29, IL-3, IL-31, IL-33, IL-35, IL-4, IL-5, IL-6, IL-6-like, IL-7, IL-8/CXCL8, IL-9, inflammasome, interferome, interferon, interferon beta-1a, interferon beta-1b, interferon gamma, interferon type I, interferon type II, interferon type III, interferons, interleukin, interleukin 1 receptor antagonist, Interleukin 8, IRF4, Leptin, leukemia inhibitory factor (LIF), leukocyte-promoting factor, LIGHT, LTA/TNFB, LT-β, lymphokine, lymphotoxin, lymphotoxin alpha, lymphotoxin beta, macrophage colony-stimulating factor, macrophage inflammatory protein, macrophage-activating factor, M-CSF, MHC class III, miscellaneous hematopoietins, monokine, MSP, myokine, myonectin, nicotinamide phosphoribosyltransferase, oncostatin M (OSM), oprelvekin, OX40L, platelet factor 4, promegapoietin, RANKL, SCF, STAT3, STAT4, STAT6, stromal cell-derived factor 1, TALL-1, TBX21, TGF-α, TGF-β, TGF-β1, TGF-β2, TGF-β3, TNF, TNFSF10, TNFSF11, TNFSF12, TNFSF13, TNFSF14, TNFSF15, TNFSF4, TNFSF8, TNF-α, TNF-β, Tpo, TRAIL, TRANCE, TWEAK, vascular endothelial growth inhibitor, XCL1, or XCL2. In some embodiments, the biomarkers includes GM-CSF, IL-1α, IL-5, IL-7, IL-12/23 p40, IL-15, IL-16, IL-17A, TNF-β, VEGF, INF-γ, IL-1β, IL-2, IL-4, IL-6, IL-8, IL-10, IL-12 p70, IL-13, TNF-α, Eotaxin, MIP-10, Eotaxin-3, TARC, IP-10, MIP-1α, IL-8, MCP-1, MDC, MCP-4, IFN-g, or VEGF-A, or a combination thereof.

[0088] In some embodiments, the assay assembly comprises one or more capture molecules. Non-limiting examples of capture molecules include a nucleic acid molecule, peptide, protein, or fragments thereof. In some embodiments, the nucleic acid molecule is a deoxyribonucleic acid (DNA) molecule or a ribonucleic acid (RNA) molecule. In some embodiments, the nucleic acid molecule or peptide is an aptamer that binds to an analyte described herein. In some embodiments, the peptide or protein is derived from the receptor binding domain (RBD) or the spike protein from a coronavirus. In some embodiments, the peptide or protein is derived from the ACE2 receptor surfaces for biomolecular detection (e.g., human ACE2). In some embodiments, the peptide or protein is an antibody or antigen-binding fragment that directly or indirectly binds the RBD of the spike protein or ACE2. In some embodiments, the capture molecule may include heparin, or a fragment thereof.

[0089] In some embodiments, the one or more capture molecules is coupled to a solid surface. In some embodiments, the one or more capture molecules is not coupled to a solid surface. In some embodiments, the solid surface is made of silicon, glass (silicon dioxide), nitrocellulose, gold, silver, polystyrene, graphene, or crystal. In some embodiments, the solid surface is a bead or a plate. In some embodiments, the plate comprises reaction wells, such as in a 96-well plate, a 384-well plate, or a 1536-well plate. In some embodiments, the bead is substantially spherical in shape.

[0090] In some embodiments, the surface is passivated. In some embodiments, the surface comprises a polymer coating comprising a polymer selected from polyethylene glycol (PEG), poly(vinyl alcohol) (PVA), poly(vinyl pyridine), poly(vinyl pyrrolidone) (PVP), poly(acrylic acid) (PAA), polyacrylamide, poly(N-isopropylacrylamide) (PNIPAM), poly(methyl methacrylate) (PMA), poly(2-hydroxylethyl methacrylate) (PHEMA), poly(oligo(ethylene glycol) methyl ether methacrylate) (POEGMA), polyglutamic acid (PGA), poly-lysine, poly-glucoside, streptavidin, and dextran.

[0091] In some embodiments, the one or more capture molecules is coupled to the surface directly or indirectly. Capture molecules coupled indirectly to the surface may, for example, be coupled to the surface by a linker. In some embodiments, the linker is a chemical linker, a peptide link, a polymer linker, or a combination thereof. In some embodiments, an epitope tag is conjugated to the one or more capture molecules. Non-limiting examples of an epitope tag include MBP, His-tag, V5 tag, c-my, HA, S-tag, strep-tag, strep-MAB, VSV-G, GST, GFP, mCherry, CFP, BFP, and DYKDDDDK (SEQ ID NO: 116). In some embodiments, the one or more capture molecules is bound by a primary capture antibody that is bound to the surface covalently or non-covalently. In some embodiments, the one or more capture molecules is conjugated to an epitope tag and the epitope tag is coupled to a primary capture antibody that is bound to the surface. Capture molecules coupled directly to the surface may, for example, be covalently or non-covalently bound to the surface.

[0092] The one or more capture molecules described herein may be immobilized to the surface directly or indirectly using a suitable surface modification chemistry depending on the intended use. Non-limiting examples of suitable surface modification chemistries are provided in Sonawane et al., Surface Modification Chemistries of Materials used in Diagnostic Platforms with Biomolecules, Journal of Chemistry (2016), which is hereby incorporated by references in its entirety.

[0093] In some embodiments, the one or more capture molecules is derived from an angiotensin-converting enzyme 2 (ACE2) receptor or a fragment thereof, or a surrogate of ACE2 (e.g., heparin) or a fragment thereof. In some embodiments, the fragment of ACE2 comprises an extracellular portion of ACE2 that binds to the spike protein. In some embodiments, the extracellular portion of ACE2 comprises the peptidase domain. In some embodiments, the fragment of ACE2 is a fragment of the extracellular portion of ACE2 that is sufficient for binding to the spike protein of a coronavirus, which are provided in Li et al., Structure of SARS coronavirus spike receptor-binding domain complexed with receptor. Science 309, 1864-1868 (2005); and Yan et al., Structural basis for the recognition of SARS-CoV-2 by full-length human ACE2, Science. 2020 Mar. 27; 367(6485): 1444-1448, which are incorporated by reference herein in their entireties. In some embodiments, ACE2 is human ACE2 (Entrez ID 59272). In some embodiments, the one or more capture molecules comprises a portion of the ACE2 polypeptide provided in SEQ ID NO: 1. In some embodiments, the one or more capture molecules comprises an amino acid sequence at least 70%, 75%, 80%, 85%, 86%, 87%, 88%, 89%, 90%, 91%, 92%, 93%, 94%, 95%, 96%, 97%, 98%, 99%, or 100% identical to the human ACE2 polypeptide (SEQ ID NO: 1). In some embodiments, the one or more capture molecules comprises an amino acid sequence at least 70%, 75%, 80%, 85%, 86%, 87%, 88%, 89%, 90%, 91%, 92%, 93%, 94%, 95%, 96%, 97%, 98%, 99%, or 100% identical to an amino acid sequence from amino acid 19 to amino acid 615 of SEQ ID NO: 1. In some embodiments, the one or more capture molecules is a peptide or protein comprising an amino acid sequence encoding a variant of the human ACE2 polypeptide (SEQ ID NO: 1), or a fragment thereof. In some embodiments, the one or more capture molecules comprises an amino acid sequence comprising a Ser19Pro or a Asp329Gly substitution with reference to SEQ ID NO: 1. Variants of ACE2 are provided in Hussain et al., Structural variants in human ACE2 may influence its binding with SARS-CoV-2 spike protein, J. Med. Virol. 2020; 92:1580-1586, which is incorporated by reference herein in its entirety. In some embodiments, the one or more capture molecules comprises at least 2, 3, 4, 5, 6, 7, 8, 9, or 10 capture molecules.

[0094] The one or more capture molecules, in some embodiments, is a surrogate for ACE2. A non-limiting example of a surrogate for ACE2 is heparin. In some embodiments, the one or more capture molecules comprises heparin, or a fragment thereof that is sufficient for binding to the spike protein. Heparin may competitively bind to the spike protein of a SARS-CoV with an affinity that is similar to that of ACE2. In some embodiments, the affinity of binding between heparin and the spike protein is less than about 1E⁻⁷, 1E⁻⁸, 1E⁻⁹, or 1E⁻¹⁰ Kd. In some cases, the binding affinity is from about 1E⁻⁹ to about 1E⁻¹⁰ Kd. In some embodiments, a surrogate of ACE2 (e.g., heparin) provided herein has a binding affinity to a spike protein of less than about 1E⁻⁷, 1E⁻⁸, 1E⁻⁹, 1E⁻¹⁰, or 1E⁻¹¹ Kd In some embodiments, the affinity of binding between heparin (or other surrogate of ACE2) and the spike protein is 1.20E⁻⁸. In some embodiments, the affinity of binding between heparin (or other surrogate of ACE2) and the spike protein is 8.30E⁻¹⁰. In some embodiments, the one or more capture molecules is a surrogate for ACE2 with a binding affinity or avidity for the spike protein of less than about 1E⁻⁷, 1E⁻⁸, 1E⁻⁹, 1E⁻¹⁰, or 1E⁻¹¹ Kd. Suitable methods of identifying surrogates for ACE2 to comparable binding affinities to the spike protein are provided at least in Guan-Yu et al., The discovery of potential natural products for targeting SARS-CoV-2 spike protein by virtual screening, bioRxiv 2020.06.25.170639. Suitable methods of calculating the affinity of binding are provided in Vangone A, Bonvin A. PRODIGY: a contact-based predictor of binding affinity in protein-protein complexes. Bio-Protocol. (2017) 7:2124.

[0095] In some embodiments, the one or more capture molecules is derived from a spike glycoprotein of a coronavirus. In some embodiments, the coronavirus is a severe acute respiratory syndrome coronavirus (SARS-CoV). In some embodiments, the SARS-CoV is SARS-CoV-2. In some embodiments, the coronavirus is Middle East Respiratory Syndrome coronavirus (MERS-CoV). In some embodiments, the coronavirus is an alpha coronavirus (e.g., 229E, NL63). In some embodiments, the coronavirus is a beta coronavirus (e.g., OC43, HKU1). In some embodiments, the one or more capture molecules comprises a portion of the spike protein. In some embodiments, the portion comprises subunit 1 of the spike protein. In some embodiments, the portion comprises the receptor binding domain (RBD) of subunit 1 of the spike protein. In some embodiments, the one or more capture molecules comprises an amino acid sequence at least 70%, 75%, 80%, 85%, 86%, 87%, 88%, 89%, 90%, 91%, 92%, 93%, 94%, 95%, 96%, 97%, 98%, 99%, or 100% identical to the spike protein, the subunit 1 of the spike protein, or the RBD of the subunit 1 of the spike protein, or a combination thereof. In some embodiments, the one or more capture molecules comprises at least 2, 3, 4, 5, 6, 7, 8, 9, or 10 capture molecules.

[0096] In some embodiments, the one or more capture molecules comprises a peptide or protein having an amino acid sequence at least 70%, 75%, 80%, 85%, 86%, 87%, 88%, 89%, 90%, 91%, 92%, 93%, 94%, 95%, 96%, 97%, 98%, 99%, or 100% identical to SEQ ID NO: 2. In some embodiments, the one or more capture molecules comprises a peptide or protein having an amino acid sequence at least 70%, 75%, 80%, 85%, 86%, 87%, 88%, 89%, 90%, 91%, 92%, 93%, 94%, 95%, 96%, 97%, 98%, 99%, or 100% identical to SEQ ID NO: 3. In some embodiments, the one or more capture molecules comprises a peptide or protein having an amino acid sequence least 70%, 75%, 80%, 85%, 86%, 87%, 88%, 89%, 90%, 91%, 92%, 93%, 94%, 95%, 96%, 97%, 98%, 99%, or 100% identical to SEQ ID NO: 4.

[0097] In some embodiments, the one or more capture molecules comprises a peptide or protein having an amino acid sequence least 70%, 75%, 80%, 85%, 86%, 87%, 88%, 89%, 90%, 91%, 92%, 93%, 94%, 95%, 96%, 97%, 98%, 99%, or 100% identical to SEQ ID NO: 5. In some embodiments, the one or more capture molecules comprises a peptide or protein having an amino acid sequence with 1, 2, 3, 4, 5, 6, 7, 8, 9, 10, 11, 12, 13, 14, 15, 16, 17, 18, 19, 20, 21, 22, 23, 24, or 25 or more of the mutations to SEQ ID NO: 5 listed in Table 1. In some embodiments, the one or more capture molecules comprises a peptide or protein having an amino acid sequence at least 70%, 75%, 80%, 85%, 86%, 87%, 88%, 89%, 90%, 91%, 92%, 93%, 94%, 95%, 96%, 97%, 98%, 99%, or 100% identical to SEQ ID NO: 6.

[0098] In some embodiments, the one or more capture molecules comprises a peptide or protein having an amino acid sequence at least 70%, 75%, 80%, 85%, 86%, 87%, 88%, 89%, 90%, 91%, 92%, 93%, 94%, 95%, 96%, 97%, 98%, 99%, or 100% identical to SEQ ID NO: 11. In some embodiments, the one or more capture molecules comprises a peptide or protein having an amino acid sequence at least 70%, 75%, 80%, 85%, 86%, 87%, 88%, 89%, 90%, 91%, 92%, 93%, 94%, 95%, 96%, 97%, 98%, 99%, or 100% identical to SEQ ID NO: 12. In some embodiments, the one or more capture molecules comprises a peptide or protein having an amino acid sequence at least 70%, 75%, 80%, 85%, 86%, 87%, 88%, 89%, 90%, 91%, 92%, 93%, 94%, 95%, 96%, 97%, 98%, 99%, or 100% identical to SEQ ID NO: 24, 47-48, 71-72, 95-96, or 115.

[0099] In some embodiments, the one or more capture molecules comprises an amino acid sequence comprising asparagine at amino acid positions 90, 322, 546, and 343 of the amino acid sequence of the spike protein, such as SEQ ID NO: 2, 5, or 11. In some embodiments, a substitution of an amino acid residue corresponding to an amino acid position selected from 344, 360, 472, 479, 480, and 487 in SEQ ID NO: 2, 5, or 11. In some embodiments, the spike protein has an amino acid sequence comprising one or more of 344K, 360F, 472L, 479N, 480D, and 487T with reference to SEQ ID NO: 2, 5, or 11. In some embodiments, the spike protein has an amino acid sequence comprising one or more of 344R, 360S, 472P, 479N, 480G, and 487S with reference to SEQ ID NO: 2, 5, or 11. In some embodiments, the spike protein has an amino acid sequence comprising 344R, 360S, 472L, 479K, 480D, 487S with reference to SEQ ID NO: 2, 5, or 11.

[0100] In some embodiments, the spike protein is derived from a mammal. In some embodiments, the spike protein is derived from a human. In some embodiments, the spike protein is derived from a non-human mammal, such as a palm civet or a bat.

[0101] In some embodiments, the one or more capture molecules is an antibody, or antibody fragment, specific to one or more antibodies against the pathogen described herein (e.g., IgM, IgG, IgA, IgE, IgD). In some embodiments, the one or more capture molecules is a monoclonal antibody or a polyclonal antibody. In some embodiments, the one or more capture molecules comprises at least 2, 3, 4, 5, 6, 7, 8, 9, or 10 capture molecules.

[0102] In some embodiments, the one or more capture molecules is a fusion protein comprising a peptide directly or indirectly bound to the surface. In some embodiments, the peptide comprises a fragment crystallizable (Fc) region of a monoclonal antibody. In some embodiments, the Fc region is derived from an antibody belonging to an immunoglobulin class comprising immunoglobulin M, immunoglobulin G, immunoglobulin A, immunoglobulin E, or immunoglobulin D.

[0103] Referring to FIG. 1, a biological sample obtained from a subject that has not been exposed to a coronavirus is assayed using the assay assembly described herein. In some embodiments, a labeled capture molecule (“CoV-2 S—Au”) comprises a peptide-conjugate comprising a detection agent (e.g., gold nanoparticle) and a peptide derived from the spike protein of SARS-CoV-2. A fluid formulation comprising the peptide-conjugate is contacted with a biological sample from the subject. In this example, the target analyte is an activity of one or more antibodies comprising blocking the binding between the spike protein of SARS-CoV-2 and ACE2. In this example the patient has not been exposed to the coronavirus, so a presence of the analyte is not expected to be detected.

[0104] In some embodiments, an immobilized capture molecule is coupled to a solid surface. In some embodiments, the immobilized capture molecule is human ACE2 receptor, surrogate thereof (e.g., heparin), or a fragment thereof. The liquid formulation is applied to the solid surface. A high number of complexes between the immobilized human ACE2 and the detectable peptide-conjugate is detected, correlating with an absence or a low amount of analyte in the sample. In some embodiments, an image of the surface is captured with an imaging device. In some embodiments, the image is a video or still image. In some embodiments, the imaging device comprises a reflectance reader. In some embodiments, the imaging device is a personal electronic device, such as a smartphone. When imaged from above the surface, a low signal indicates a high degree of binding between human ACE2 and the peptide-conjugate (therefore, a low amount of the analyte). When imaged from below the surface, a high signal indicates a high degree of binding between the human ACE2 and the peptide-conjugate.

[0105] In contrast, a biological sample obtained from a subject that was exposed to a coronavirus assayed using the assay assembly described herein, is provided in FIG. 2. A low number of complexes between the immobilized human ACE2 and the detectable peptide-conjugate is detected, which correlates with a presence absence or a high amount of analyte in the sample.

[0106] In some embodiments, the surface of the image is not captured. Referring to FIG. 7, a biological sample obtained from the subject exposed to a coronavirus is assayed using the assay assembly described here. A low number of complexes between the immobilized human ACE2 and the detectable peptide-conjugate is detectable by the human eye in the detection zone of the device.

[0107] In some embodiments, the assay assembly is adapted for nucleic acid molecule detection, such as to detect a nucleic acid molecule encoding a biomarker or an antibody described herein. In a non-limiting example, the assay assembly is adapted to detect RNA (or cDNA) encoding a region of the pathogen of interest or a marker of an adaptive immune response, such as a cytokine.

[0108] In some embodiments, the assay assembly performs reverse transcription polymerase chain reaction (RT-PCR). In some embodiments, the assay assembly is a singleplex (e.g., individual assays) or multiplexed (e.g., detection of more than one biomarker in a single reaction). The assay assembly comprises a primer pair and a probe set to amplify and detect the biomarker. In some embodiments, the assay assembly comprises at least 2, 3, 4, 5, 6, 7, 8, 9, 10, 11, 12, 13, 14, 15, 16, 17, 18, 19, or 20 primer pairs. In some embodiments, the assay assembly comprises at least 2, 3, 4, 5, 6, 7, 8, 9, 10, 11, 12, 13, 14, 15, 16, 17, 18, 19, or 20 probes. A “probe” is a nucleic acid molecule comprising greater than or equal to about 30 contiguous nucleobases adapted to hybridize to the nucleic acid sequence of the target region of the biomarker. In some embodiments, the RT-PCR is qualitative PCR (qPCR), and the probe comprises a detectable moiety. In some embodiments, the detectable moiety comprises TaqMan™, SYBR green, SYBR green I, SYBR green II, SYBR gold, ethidium bromide, methylene blue, Pyronin Y, DAPI, acridine orange, Blue View or phycoerythrin, or a combination thereof. In some embodiments, the probe may be a hydrolysable probe comprising a fluorophore and quencher that is hydrolyzed by DNA polymerase when hybridized to a target nucleic acid, such as for a TaqMan™ assay assembly.

[0109] In some embodiments, the assay assembly is an array comprising probes conjugated or otherwise immobilized on a surface described herein (e.g., a bead, multi-well plate), wherein the probes are configured to hybridize with the nucleic acid sequence of the target region. In some embodiments, the target region of the biomarker comprises a mutation, such as a single nucleotide variation or an indel. In some embodiments, the surface comprises an Affymetrix gene chip array, and the like.

### Lateral Flow Assay

[0110] In some embodiments, the assay assembly is a lateral flow assay (LFA). In some embodiments, the surface is a membrane comprising porous paper, a polymer structure, a sintered polymer, or a combination thereof. In some embodiments, the LFA assembly has one or more zones situated laterally, including a detectable zone. The detectable zone comprise at least a control region and a test region.

[0111] In some embodiments, the LFA assembly further comprises a sample receptor (e.g., a sample pad) configured to receive a biological sample. In some embodiments, the sample receptor comprises a filter designed to separate a component of the biological sample to be tested. For instance, if a biological sample were blood, the sample component would be blood serum. In some embodiments, the LFA assembly further comprises an absorbent pad.

[0112] In some instances, the target analyte moves without the assistance of external forces, e.g., by capillary action. In some instances, the target analyte moves with assistance of extemal forces, e.g., by facilitation of capillary action by movement of the lateral flow assembly (e.g., shaking, turning, centrifuging, applying an electrical field or magnetic field, applying a pump, applying a vacuum, or rocking).

[0113] Any suitable lateral flow test strip detection format known to those of skill in the art is contemplated for use in an assay assembly of the present disclosure. Lateral flow test strip detection formats are well known and have been described in the literature. Lateral flow test strip assay formats are generally described by, e.g., Sharma et al., (2015) Biosensors 5:577-601, incorporated by reference herein in its entirety. Detection of nucleic acids using lateral flow test strip sandwich assay formats is described by, e.g., U.S. Pat. No. 9,121,849, “Lateral Flow Assays,” incorporated by reference herein in its entirety. Detection of nucleic acids using lateral flow test strip competitive assay formats is described by, e.g., U.S. Pat. No. 9,423,399, “Lateral Flow Assays for Tagged Analytes,” incorporated by reference herein in its entirety.

[0114] Disclosed herein, in some embodiments, are signal detection devices, such as an imaging device. In some embodiments, the imaging device is a personal electronic device (e.g., smartphone or tablet). In some embodiments, the imaging device comprises a fluorescence reader, a colorimeter, or a sensor.

[0115] In some embodiments, the peptide-conjugate described herein comprises detection reagent or a label. Non-limiting examples of a detection reagent include a fluorophore, a chemical, a nanoparticle, an antibody, a peptide, and a nucleic acid probe. In some embodiments, the nanoparticle comprises a material selected from agarose, plastic, acrylic, or metal. In some embodiments, the nanoparticle is a microsphere. In some embodiments, the nanoparticle is magnetic. In some embodiments, the imaging device detects color, reflectance, fluorescence, bioluminescence, chemiluminescence, light, or an electrical signal.

[0116] In some embodiments, the LFA assembly is in a sandwich format, a competitive format. In a sandwich assay format, the detected signal is directly proportional to the amount of the target analyte present in the sample, so that increasing amounts of the target analyte lead to increasing signal intensity. In a competitive assay format, the detected signal has an inverse relationship with the amount of analyte present, and increasing amounts of analyte lead to decreasing signal intensity.

[0117] In a lateral flow sandwich format, also referred to as a “sandwich assay,” the biological sample (test sample) is applied to a sample receptor (“sample pad”) at a distal end of the LFA test strip. The biological sample flows through the test strip, from the sample pad to a conjugate pad located adjacent to, and downstream from, the sample pad. In some embodiments, the conjugate pad comprises a labeled capture molecule, e.g., an antibody or aptamer labeled with e.g., a dye, enzyme, or nanoparticle. A complex between the capture molecule and the target analyte is formed if the target analyte is present in the test sample. This complex then flows to a first test zone or sector (e.g., a test line) comprising an immobilized second capture molecule which is specific to the target analyte, thereby trapping any labeled capture molecule-target analyte complexes. In some embodiments, the intensity or magnitude of signal, e.g., color, fluorescence, reflectance, at the first test zone or sector is used to indicate the presence or absence, quantity, or presence and quantity of target analyte in the test sample. In some embodiments, the assay assembly comprises a second test zone or sector comprising a third capture molecule that binds to excess labeled capture molecule. If the applied test sample comprises the target analyte, little or no excess labeled capture molecule will be present on the test strip following capture of the target analyte by the labeled capture molecule on the conjugate pad. Consequently, the second test zone or sector will not bind any labeled capture molecule, and little or no signal (e.g., color, fluorescence, reflectance) at the second test zone or sector is expected to be observed. The absence of signal at the second test zone or sector thus provides assurance that signal observed in the first test zone or sector is due to the presence of the target analyte.

[0118] In some embodiments, the sandwich assay is configured to receive a biological sample disclosed herein and retain sample components (e.g., target analyte). In some embodiments, the sandwich assay is configured to receive a flow solution that flushes unwanted cellular components (other than the analyte) of the biological sample, leaving the target analyte behind. In some embodiments, the sandwich assay comprises a membrane that binds the target analyte to help retain the target analyte when the flow solution is applied. Non-limiting examples of a membrane that binds a target analyte includes chitosan modified nitrocellulose.

[0119] In some embodiments, the assay assembly comprises a sandwich assay. In some embodiments, the target analyte is an antibody specific to a pathogen of interest (e.g., SARS-CoV-2). In some cases, capture molecule is a peptide derived from a spike protein from a coronavirus (e.g., SARS-CoV-2). In some embodiments, immobilized capture molecule is an antibody specific to the target analyte, such as an antibody or antigen-binding fragment. In some embodiments, the capture molecule is labeled, and a signal corresponding to the presence of the target analyte is visualized. In some embodiments, a labeled secondary molecule (e.g., antibody or antibody fragment) specific to the capture molecule added, and a signal corresponding to the presence of a complex between the target analyte, the capture molecule, and the secondary molecule is visualized. In some embodiments, signal is observed at the first test zone comprising color, fluorescence, or reflectance emitted from the labeled capture molecule. In some embodiments, the labeled capture molecule is a peptide-conjugate comprising a peptide derived from a spike protein from a coronavirus, and a label comprising a nanoparticle (e.g., microsphere), an enzymatic label, or a fluorescent dye.

[0120] In some embodiments, the assay assembly detects more than one target analyte. In some embodiments, the assay assembly provides two or more capture molecules that are specific to two or more antibodies specific to a pathogen of interest, such as, for example IgG, IgM, or IgA antibodies against SARS-CoV-2. In some embodiments, the two or more capture molecules are labeled. In some embodiments, the two or more capture molecules are not labeled. In some embodiments, two or more labeled secondary molecules specific to the two or more capture molecules are added to the assay assembly, and visualized as described herein.

[0121] In a lateral flow competitive format, also referred to as a “competitive assay,” the test sample is applied to a sample pad at one end of the test strip, and the target analyte binds to a labeled capture molecule to form a complex between the target analyte and the labeled capture molecule in a conjugate pad downstream of the sample application pad. In the competitive format, the first test zone comprises an immobilized capture molecule specific to second capture molecule that is labeled. In the absence of the target analyte, the immobilized capture molecule and the labeled second capture molecule form a detectable complex. In the presence of the target analyte, fewer complexes between the capture molecule and the labeled second capture molecule form due to competition for binding to the labeled second capture molecule. In some embodiments, the intensity or magnitude of signal, e.g., color, fluorescence, reflectance, at the first test zone or sector is inversely proportionate to the presence or absence, quantity, or presence and quantity of the target analyte in the test sample.

[0122] In some embodiments, the assay assembly comprises a competitive assay. Referring to FIG. 3, the labeled capture molecule comprises a peptide-conjugate comprising a detection agent (e.g., gold nanoparticle) and a peptide derived from the spike protein of a coronavirus. A fluid formulation comprising the peptide-conjugate is contacted with a biological sample from a patient and human ACE2, wherein the peptide derived from the spike protein of the coronavirus comprises a receptor binding domain (RBD) specific to the human ACE2. In this example, the target analyte is one or more antibodies against the spike protein of the coronavirus. In this example the patient has not been exposed to the coronavirus, so a presence of the analyte is not expected to be detected.

[0123] The liquid formulation comprises at least one detectable complex comprising the peptide-conjugate RBD and the human ACE2, because the biological sample does not consist of antibodies against the RBD of the peptide. The liquid formulation comprising the peptide-conjugate, the biological sample, and the human ACE2 is applied to a solid surface at least partially enclosed in a housing (“test cartridge”). The liquid formulation is applied to the distal end of the solid surface at a sample pad, and flows unidirectionally over the solid surface towards the opposite distal end of the solid surface. In some embodiments, the biological sample is blood, and the sample pad separates serum from blood, permitting only the serum to flow across the solid surface. In some embodiments, the solid surface is a nitrocellulose membrane. In some embodiments, the first test zone comprises an immobilized antibody specific to the human ACE2. In some embodiments, the second test zone comprises an immobilized antibody specific to the RBD of the spike protein. In some embodiments, a high signal is observed at the first test zone, because there is an absence of target analyte in the biological sample. In some embodiments, a high signal is observed at the second test zone (positive control), for the same reason.

[0124] In alternative embodiments, the immobilized capture molecule in the first test zone is human ACE2 receptor, and the fluid formulation does not contain human ACE2. In this example, the liquid formulation comprises the peptide-conjugate and the biological sample. No complexes form between the peptide-conjugate in the absence of the target analyte (antibodies against the RBD of the spike protein). The liquid formulation is applied to the distal end of the solid surface at a sample pad, and flows unidirectionally over the solid surface towards the opposite distal end of the solid surface. Like above, in the first and second test zones, a high signal is observed in the absence of the test analyte.

[0125] Referring to FIG. 4, the same competition assay is performed on biological sample obtained from a subject that has been exposed to the coronavirus. In some embodiments, there is a presence of the target analyte in the biological sample. Therefore, a low signal is observed at the first and second test zones, which indicates a high amount of competitive binding between the target analyte and the peptide-conjugate.

[0126] Referring to FIG. 8A-8D, the assay assembly measures analyte in the biological sample. In some embodiments, the assay assembly measures one analyte (e.g. an neutralizing antibody) in the biological sample. Referring to FIG. 8A-8B, one capture molecule is used, for example RBD. FIG. 8A exemplifies an assay assembly after it is performed with a biological sample that is obtained from an individual that does not have neutralizing antibodies against RBS. The peptide-conjugate (e.g., ACE2) conjugated to a detectable moiety binds to the RBD in the absence of neutralizing antibodies. The detectable moiety is visualized using the naked eye, or an imaging device described herein. FIG. 8B exemplifies an assay assembly after it is performed with a biological sample that is obtained from an individual that has neutralizing antibody against RBD. The peptide-conjugate (e.g., ACE2) conjugated to a detectable moiety does not bind to the RBD in the presence of neutralizing antibody in the patient sample.

[0127] In some embodiments, the assay assembly measures more than one analyte (e.g., neutralizing antibody) in the biological sample. Referring to FIG. 8C-8D, more than one capture molecule is used, for example RBD1 and RBD2. In some embodiments, two or more capture molecules are used. In some embodiments, the two or more capture molecules comprise a first capture molecule and a second capture molecule, wherein the first capture molecule comprises a first variant RBD and the second capture molecules comprises a second variant RBD. In some embodiments, at least 3, 4, 5, 6, 7, 8, 9, or 10 capture molecules are used. In some embodiments, one of the capture molecules are the same. FIG. 8C exemplifies an assay assembly after it is performed with a biological sample that is obtained from an individual that does not have neutralizing antibodies against either of RBD1 and RBD2. The peptide-conjugate (e.g., ACE2) conjugated to a detectable moiety binds to the RBD1 and RBD2 in the absence of neutralizing antibodies. The detectable moiety is visualized using the naked eye, or an imaging device described herein. FIG. 8D exemplifies an assay assembly after it is performed with a biological sample that is obtained from an individual that has neutralizing antibodies against both RBD1 and RBD2. The peptide-conjugate (e.g., ACE2) conjugated to a detectable moiety does not bind to the RBD1 and RBD2 in the presence of neutralizing antibodies in the patient sample.

[0128] In a lateral flow test strip detection format, more than one target analyte is detected using the test strip through the use of additional test zones or sectors comprising, e.g., probes specific for each of the target analytes.

[0129] In some instances, the lateral flow device is a layered lateral flow device, comprising zones or sectors that are present in layers situated medially, e.g., above or below each other. In some instances, one or more zones or sectors are present in a given layer. In some instances, each zone or sector is present in an individual layer. In some instances, a layer comprises multiple zones or sectors. In some instances, the layers are laminated. In a layered lateral flow device, processes controlled by diffusion and directed by the concentration gradient are possible driving forces. For example, multilayer analytical elements for fluorometric assay or fluorometric quantitative analysis of an analyte contained in a sample liquid are described in EP0097952, “Multilayer analytical element,” incorporated by reference herein.

[0130] A lateral flow device comprises one or more functional zones or sectors. In some embodiments, the test assembly comprises 1 to 20 functional zones or sectors. In some instances, the functional zones or sectors comprise at least one sample purification zone or sector, at least one target analyte amplification zone or sector, at least one target analyte detection zone or sector, and at least one target analyte detection zone or sector.

[0131] In some embodiments, the assay assembly comprises a detection zone made up of at least the first and the second test zones (test, and control). In some embodiments, the assay assembly comprises more than one test zone. In some embodiments, the assay assembly comprises a first test zone and a second test zone, wherein the first test zone indicates a presence or a quantity of neutralizing antibodies that competitively bind to the peptide-conjugate; and the second test zone indicates a presence or a quantity of antibodies against the pathogen (neutralizing or otherwise). In some embodiments, the assay assembly comprises a third test zone. In some embodiments, the second test zone detects IgG antibodies against the pathogen. In some embodiments, the third test zone detects IgM antibodies against the pathogen. In some embodiments, the assay assembly comprises a plurality of test zones, wherein each test zone of the plurality measures a different analyte. In some embodiments, an image of the detection zone is captured with an imaging device. In some embodiments, the image is a video or still image. In some embodiments, the imaging device comprises a fluorescence reader, a colorimeter, or a sensor. In some embodiments, the imaging device is a personal electronic device, such as a smartphone.

[0132] In some embodiments, the assay assembly is a lab-on-chip system (e.g., Maverik@). In some embodiments, the solid surface comprises a silicon chip. In some embodiments, the imaging device comprises photonic biosensors that measure changes in refractive index caused by binding between the analyte and the peptide-conjugate to form complexes, as described in Iqbal M., et al. (2010) Label-Free Biosensor Arrays Based on Silicon Ring Resonators and High-Speed Optical Scanning Instrumentation. IEEE J Sel Quantum Elec 16.

[0133] In some embodiments, the lateral flow assay assembly confirms presence, absence, or quantity of the neutralizing antibody described herein from a subject's biological sample. In some embodiments, a subject may be a member of a variety of races. For example, the subject may be of the White, Black, Hispanic, or Asian race. In some embodiments, a subject may be of a variety of ages. For example, the subject may be age 0 to age 18, age 18 to age 65, or age 65 and above. In some embodiments, a subject may be a male or a female. In some embodiments, a subject may be pregnant, breastfeeding, or may have priorly been infected with a coronavirus. In some embodiments, a subject may be a high risk subject and have one or more risk factors related to a coronavirus. In some embodiments, a subject may be obese. In some instances, the lateral flow assay assembly prognoses a subject's immunity to any one of the pathogens described herein. In some embodiments, the lateral flow assay assembly prognoses a subject's immunity to coronavirus. In some embodiments, the lateral flow assay assembly prognoses a subject's immunity to SARS-CoV-2. In some embodiments, the lateral flow assay assembly measures the subject's susceptibility to an infection by any one of the pathogens described herein. In some embodiments, the lateral flow assay assembly measures the subject's susceptibility to an infection by coronavirus. In some embodiments, the lateral flow assay assembly measures the subject's susceptibility to an infection by SARS-CoV-2. In some embodiments, the lateral flow assay assembly identifies individuals in a population that respond to a vaccine and individuals in a population that do not respond to a vaccine. In some embodiments, the lateral flow assay assembly minimizes or reduces the risk associated with usage of a commercialized vaccine in a population (e.g., by identifying individuals that do not respond to the vaccine). In some embodiments, the lateral flow assay assembly identifies neutralizing antibodies as a surrogate marker of protection from a vaccine (e.g., in place of traditional, randomized, placebo-controlled trials). In some embodiments, the lateral flow assay assembly classifies vaccines by % efficacy in a population.

[0134] In some embodiments, the lateral flow assays provided herein have an accuracy of at least 80%, for example, at least 85%, at least 86%, at least 87%, at least 88%, at least 89%, at least 90%, at least 91%, at least 92%, at least 93%, at least 94%, at least 95%, at least 96%, at least 97%, at least 98%, at least 99%, or greater. In some embodiments, the lateral flow assays provided herein have a sensitivity of at least 80%, for example, at least 85%, at least 86%, at least 87%, at least 88%, at least 89%, at least 90%, at least 91%, at least 92%, at least 93%, at least 94%, at least 95%, at least 96%, at least 97%, at least 98%, at least 99%, or greater. In some embodiments, the lateral flow assays provided herein have a specificity of at least 80%, for example, at least 85%, at least 86%, at least 87%, at least 88%, at least 89%, at least 90%, at least 91%, at least 92%, at least 93%, at least 94%, at least 95%, at least 96%, at least 97%, at least 98%, at least 99%, or greater.

### Fluorescence Resonance Energy Transfer (FRET) Assay

[0135] In some embodiments, the assay assembly is a solution-based assay and does not consist of a solid surface. In some embodiments, the solution-based assay comprises labeling any one of the capture molecules described herein by conjugating the capture molecule to a detectable moiety of any one of the moieties described herein. In some embodiments, the signal is detected when the capture molecule forms a complex between the capture molecule and the target analyte. In some embodiments, the signal is not detected when the capture molecule forms a complex between the capture molecule and the target analyte. Exemplary solution-based assay comprising the labeled capture molecules includes Förster resonance energy transfer (FRET), fluorescence polarization (FP), radioligand binding assay, bioluminescent binding assay, and immunoprecipitation (e. g. ELISA and western blotting). In some embodiments, the solution-based assay comprises unlabeled capture molecules, where the detection of the complex formed between the capture molecule and the target analyte is detected by a separate mechanism. Exemplary solution-based assay comprising unlabeled capture molecules includes surface plasmon resonance (SPR), plasmon-waveguide resonance, whispering gallery microresonator (WGM), resonant waveguide grating (RWG), mass spectrometry, nuclear magnetic resonance, X-ray crystallography, thermal denaturation assays (TDA), and isothermal titration calorimetry (ITC).

[0136] In some embodiments, the assay assembly is a (FRET) system. In some embodiments, the FRET system comprises conjugating donor and acceptor fluorophores to any one of the capture molecules described herein. In some embodiments, a complex is formed between the capture molecule and the target analyte, which prevents the donor fluorophore to be in close proximity to acceptor fluorophore to generate a detectable fluorescence. In some embodiments, referring to FIG. 9A-9D, fluorescence resonance transfer (FRET) is utilized in solution to identify a presence or a quantity of neutralizing antibodies that functionally block binding between the RBD of the spike protein derived from SARS-CoV and the cognate receptor, ACE2. FRET relies on the excitation energy of a donor fluorophore to a nearby acceptor fluorophore. In some embodiments, the peptide-conjugate (e.g., RBD peptide, or portion thereof) is coupled to a donor fluorophore, and the cognate receptor (e.g., ACE2, or portion thereof) is coupled to an acceptor fluorophore. In some embodiments, the donor or the acceptor fluorophore may be any suitable fluorescent protein. In some embodiments, the fluorescent proteins comprise a color selected from, blue, cyan, green, and yellow.

[0137] Referring to FIG. 9A, when a biological sample that is obtained from an individual that does not have neutralizing antibodies against the RBD, excitation of the acceptor fluorophore is observed. Whereas, no excitation of the acceptor fluorophore is observed if the biological sample contains neutralizing antibodies against RBD, as shown in FIG. 9B.

[0138] Operating in a similar manner to FIG. 8A-8B, FIG. 9C-9D provides an assay assembly in solution (e.g., not involving a solid surface) using FRET.

[0139] The FRET assay may be performed in a vessel, such as a container or a test tube. In some embodiments, the FRET assay is performed in an assay plate, such as, a 96-well plate, a 384-well plate, or a 1536-well plate. In some embodiments, the FRET assay is performed in a high-throughput method to decrease the amount of reagents and the cost of performing the assay. In some embodiments, the FRET assay utilizes small volumes of reagents, for example, less than 100 nL, less than 90 nL, less than 80 nL, less than 70 nL, less than 60 nL, or less than 50 nL of reagents.

[0140] In some embodiments, the biological sample (e.g., blood from a finger prick) is stored in or on a biological sample medium (BSM), such as a dried blood spot card (DBS), described herein. The biological sample is removed from the BSM and placed into the vessel (e.g., a well of a 96-well plate) to be eluted from the BSM. Next, the eluted biological sample is assayed using the FRET system deposited on a solid surface described herein.

[0141] In some embodiments, the FRET assay confirms presence, absence, or quantity of the neutralizing antibody described herein from a subject's biological sample. In some instances, the FRET assay prognoses a subject's immunity to any one of the pathogen described herein. In some embodiments, the FRET assay prognoses a subject's immunity to coronavirus. In some embodiments, the FRET assay prognoses a subject's immunity to SARS-CoV-2. In some embodiments, the FRET assay measures the subject's susceptibility to an infection by any one of the pathogens described herein. In some embodiments, the FRET assay measures the subject's susceptibility to an infection by coronavirus. In some embodiments, the FRET assay measures the subject's susceptibility to an infection by SARS-CoV-2. In some embodiments, the FRET assay identifies individuals in a population that respond to a vaccine and individuals in a population that do not respond to a vaccine. In some embodiments, the FRET assay minimizes or reduces the risk associated with usage of a commercialized vaccine in a population (e.g., by identifying individuals that do not respond to the vaccine). In some embodiments, the FRET assay identifies neutralizing antibodies as a surrogate marker of protection from a vaccine (e.g., in place of traditional, randomized, placebo-controlled trials). In some embodiments, the FRET assay classifies vaccines by % efficacy in a population.

[0142] In some embodiments, the FRET assays provided herein have an accuracy of at least 80%, for example, at least 85%, at least 86%, at least 87%, at least 88%, at least 89%, at least 90%, at least 91%, at least 92%, at least 93%, at least 94%, at least 95%, at least 96%, at least 97%, at least 98%, at least 99%, or greater. In some embodiments, the FRET assays provided herein have a sensitivity of at least 80%, for example, at least 85%, at least 86%, at least 87%, at least 88%, at least 89%, at least 90%, at least 91%, at least 92%, at least 93%, at least 94%, at least 95%, at least 96%, at least 97%, at least 98%, at least 99%, or greater. In some embodiments, the FRET assays provided herein have a specificity of at least 80%, for example, at least 85%, at least 86%, at least 87%, at least 88%, at least 89%, at least 90%, at least 91%, at least 92%, at least 93%, at least 94%, at least 95%, at least 96%, at least 97%, at least 98%, at least 99%, or greater.

### Agglutination Assay

[0143] In some embodiments, the assay assembly comprises an assembly for agglutination assay. Agglutination assay relies on agglutination of particles or nanoparticles due to a capture molecule or peptide-conjugate forming a complex with the target analyte in the sample, thus indicating the presence of the target analyte in the sample. In some embodiments, the agglutination assay comprises separating free and bound label by chromatographically separating agglutinated and non-agglutinated antibody-coated colored particles along a membrane. In some embodiments, the agglutination assay comprises a colored latex agglutination reaction, where agglutinated and non-agglutinated particles are separated by a capillary which allows non-agglutinated latex beads through but traps the aggregated latex beads. In some embodiments, the agglutination assay comprises multivalent analytes whereby in the absence of analyte label passes through a filter, but in the presence of analyte an agglutinate is formed which is trapped. In some embodiments, the agglutination assay comprises a system, where a test mixture is formed by contacting the sample with colored particles having analyte-specific receptors on the surface of the particles. The test mixture is passed through a filter having pores which are larger than the colored particles but smaller than the particle-analyte aggregates, thus causing trapping of the aggregates. Presence of aggregates from the mixture is determined by checking the color of the filtrate. In some embodiments, the agglutination assay comprises a lateral flow assay without immobilizing antibody for very large analytes. In some embodiments, the agglutination assay comprises a 2-zone system, where one zone having large pores and one zone having small pores, such that analyte passes through the large pores but becomes trapped by the zone of small pores. Such arrangement is used in conjunction with a small label (e.g. gold particle) which passes through both zones. In the presence of target analyte, a fraction of the gold particle becomes bound to the target analyte and becomes trapped at the zone with small pores. In some embodiments, the agglutination assay is a non-capillary agglutination assay.

[0144] In some instances, the agglutination assay comprises covalently or non-covalently linking a particle or nanoparticle with at least one capture molecule, at least one detectable moiety, and/or at least one peptide-conjugate. In some embodiments, the particle or nanoparticle comprises macromolecule, colloidal metal (such as gold or silver) particle, bead (e.g. latex bead), charcoal, kaolinite, or bentonite. In some embodiments, the particle or nanoparticle also function as detectable moiety. In some embodiments, the particle or nanoparticle comprises of the same material as the detectable moiety. In some embodiments, the particle, nanoparticle, or detectable moiety comprises material that is agglutinable, with other (preferably similar or identical) particle, nanoparticle, or detectable moiety. The ability of the particle, nanoparticle, and detectable moiety to agglutinate enables the formation of larger agglutinates, resulting in increased stability or the detectable signal generated from the agglutinated particle, nanoparticle, or detectable moiety.

[0145] In some embodiments, the detectable moiety comprises detectable material such as a fluorescent dye, an enzymatic label, or a colorimetric label. Detectable moiety includes enzymatic label (e.g., horseradish peroxidase (HRP), beta-galactosidase, alkaline phosphatase, etc), fluorescent dye, luminescent moiety, radioactive moiety, colorimetric label, colored latex particle or nanoparticle, and metal-conjugated moiety such as metallic nanolayer, metallic nanoparticle, or metallic nanoshell-conjugated moiety. Suitable metallic nanoparticle or metallic nanoshell moiety includes gold particle, silver particle, copper particle, platinum particle, cadmium particle, composite particle, gold hollow sphere, gold-coated silica nanoshell, and silica-coated gold shell. Metallic nanolayer suitable for detectable moiety includes nanolayer comprising cadmium, zinc, mercury, gold, silver, copper, and platinum.

[0146] In some embodiments, the detectable moiety is directly or indirectly tagged for a colorimetric assay (e.g., for detection of HRP or beta-galactosidase activity), visual inspection using light microscopy, immunofluorescence microscopy, confocal microscopy, by flow cytometry (FACS), autoradiography electron microscopy, immunostaining, or subcellular fractionation. In some embodiments, the detectable moiety is directly incorporated into the capture molecule. For example, a radioactive amino acid is inserted into the capture molecule comprising a peptide. In some embodiments, the detectable moiety is part of the peptide-conjugate. In some embodiments, the detection method comprises visually examining for signs of agglutination. In some embodiments, the detection method comprises visibly examining the agglutination for a color change or a physical-chemical change. Physical-chemical changes can occur with oxidation reactions or other chemical reactions, which is detected both visually or via a spectrophotometer. In some embodiments, the agglutination of the particles or nanoparticles due to formation of a complex formed between: capture molecule and target analyte; capture molecule and peptide-conjugate; and/or target analyte and peptide-conjugate is visually examined. In some embodiments, the complex formed is examined using color, reflectance, fluorescence, bioluminescence, or chemiluminescence. In some embodiments, the target analyte is a monoclonal or polyclonal antibody against a protein of any one of the pathogen described herein. In some embodiments, the target comprises a neutralizing antibody. In some embodiments, the target analyte is a monoclonal or polyclonal neutralizing antibody recognizing a spike glycoprotein of a coronavirus. In some embodiments, the target analyte is a monoclonal or polyclonal neutralizing antibody recognizing a spike glycoprotein of SARS-CoV-2. In some embodiments, the target analyte is targeted and captured by the capture molecules described herein.

[0147] In some embodiments, agglutination assay assembly comprises particle or nanoparticle linked to capture molecules comprising both ACE2 and spike glycoprotein. If the target analyte comprising the neutralizing antibody recognizing spike glycoprotein is absent in a biological sample, agglutination is observed due to the complex formed by the spike glycoprotein binding to ACE2. In such case, the observed agglutination or signal of the agglutination is indicative of the absence of the target analyte in the biological sample. Conversely, if the target analyte comprising the neutralizing antibody recognizing the spike glycoprotein is present in the biological sample, the binding of the target analyte to the spike glycoprotein prevents the complex formation between spike glycoprotein and ACE2. In this case, the absence of agglutination or signal of the agglutination is indicative of the presence of the target analyte in the biological sample. In some embodiments, the agglutination assay assembly confirms presence, absence, or quantity of the neutralizing antibody described herein from a subject's biological sample. In some instances, the agglutination assay assembly prognoses a subject's immunity to any one of the pathogen described herein. In some embodiments, the agglutination assay assembly measures the subject's susceptibility to an infection by any one of the pathogen described herein.

### ELISA

[0148] In some embodiments, the assay assembly comprises an assembly for enzyme-linked immunosorbent assay (ELISA). In certain embodiments, one or more capture molecules are attached or immobilized on a solid support. In some cases, the peptide-conjugate is attached or immobilized on the solid support. In some embodiments, the target analyte is attached or immobilized on the solid support. The solid support is a bead such as colloidal particle, metallic nanoparticle, nanoshell, or latex bead; a flow path in a lateral flow immunoassay device (e.g., a porous membrane); a blot (e.g., Western blot, a slot blot, or dot blot); a flow path in an analytical or centrifugal rotor, or a tube or well (e.g., in a plate suitable for an ELISA or microarray). In some embodiments, the solid support is a plate such as a microtiter plate with multiple wells. In some embodiments, the one or more capture molecules or one or more peptide conjugates is biotinylated, or conjugated to streptavidin, avidin, or neutravidin. In some embodiments, the target analyte is attached to the surface of the well of the microtiter plate via direct binding to the well of the microtiter plate. In some embodiments, the target analyte is attached to the well via binding to one or more capture molecules that are attached to the well of the microtiter plate. In some embodiments, the target analyte is attached or immobilized to the well via binding to one or more peptide-conjugates that are attached or immobilized to the well of the microtiter plate. In some embodiments, the target analyte is attached to the well via binding to one or more peptide-conjugates that form a complex with the one or more capture molecules that are attached or immobilized to the well of the microtiter plate. Residual or nonspecific protein-binding on the solid support can then blocked with an blocking agent, such as bovine serum albumin (BSA) or heat-inactivated normal goat serum (NGS).

[0149] In some embodiments, the solid support is incubated with a biological sample suspected of containing the target analyte. The sample is applied and/or attached to the solid support undiluted or diluted. After incubation, the solid support is washed to remove unbound protein and then incubated with an optimal concentration of the one or more capture molecules conjugated to a detectable moiety or to a substrate of the detectable moiety. In some cases, one or more capture molecules conjugated to the detectable moiety comprises secondary antibody, which binds to the neutralizing antibody in the target analyte. In some embodiments, the target analyte comprises any one of the antibody or any one of the neutralizing antibody described herein.

[0150] The detectable moiety comprises an enzyme, including HRP, beta-galactosidase, alkaline phosphatase (ALP), and glucose oxidase. Sufficient time is allowed for specific binding between the one or more capture molecules and the target analyte to occur. Color is allowed to develop and the optical density of the contents of the well is determined visually or instrumentally (measured at an appropriate wave length) via the use of a spectrophotometer. In some embodiments, the ELISA assay assembly confirms presence, absence, or quantity of the neutralizing antibody described herein from a subject's biological sample. In some instances, the ELISA assay assembly prognoses a subject's immunity to any one of the pathogen described herein. In some embodiments, the ELISA assay assembly measures the subject's susceptibility to an infection by any one of the pathogen described herein.

### Testing Device and System Components

[0151] Disclosed herein, in some embodiments, are testing devices comprising a housing. In some embodiments, a testing device is at least partially enclosed by the housing. In some embodiments, the testing device is fully enclosed by the housing. In some embodiments, the housing comprises a synthetic polymer material, such as plastic.

[0152] In some embodiments, the housing is configured to provide information to an imaging device described herein. Information can include, but is not limited to, information to normalize an image of the testing device and identifying information (e.g., barcode, RFID chip). In some embodiments, the identifying information comprises test parameters, test result interpretation instructions, expected values for imaging controls, and the like.

[0153] Disclosed herein, in some embodiments, are testing devices comprising a sample receptor. In some embodiments, the sample receptor is a sample receiver, a sample processor, a sample purifier, or a combination thereof. In some embodiments, the sample receptor is a sample receiver configured to receive and retain a biological sample obtained from a subject. In some embodiments, the sample receptor is a sample processor configured to remove a component of the sample or separate the sample into multiple fractions (e.g., blood cell fraction and plasma or serum).

[0154] Useful separation materials may include specific binding moieties that bind to or associate with the substance. Binding is covalent or noncovalent. Any suitable binding moiety known in the art for removing a particular substance is used. For example, antibodies and fragments thereof are commonly used for protein removal from samples. In some instances, a sample purifier disclosed herein comprises a binding moiety that binds a nucleic acid, protein, cell surface marker, or microvesicle surface marker in the biological sample. In some instances, the binding moiety comprises an antibody, antigen binding antibody fragment, a ligand, a receptor, a peptide, a small molecule, or a combination thereof.

[0155] The sample receptor is a sample purifier, configured to remove an unwanted substance or non-target component of a biological sample. Depending on the source of the biological sample, unwanted substances can include, but are not limited to, proteins (e.g., antibodies, hormones, enzymes, serum albumin, lipoproteins), free amino acids and other metabolites, microvesicles, nucleic acids, lipids, electrolytes, urea, urobilin, pharmaceutical drugs, mucous, bacteria, and other microorganisms, and combinations thereof. In some embodiments, the sample purifier separates components of a biological sample disclosed herein. In some embodiments, the sample purifier disclosed herein removes one or more components of a sample that would inhibit, interfere with or otherwise be detrimental to the analyses of the target analyte. In some embodiments, the resulting modified sample is enriched for the target analyte. This is considered indirect enrichment of target analytes. Alternatively or additionally, target analytes may be captured directly, which is considered direct enrichment of target analytes.

[0156] In some embodiments, sample purifiers disclosed herein comprise a filter. In some embodiments, sample purifiers disclosed herein comprise a membrane. Generally the filter or membrane is capable of separating or removing cells, cell particles, cell fragments, blood components other than cell-free nucleic acids, or a combination thereof, from the biological samples disclosed herein.

[0157] In some embodiments, the sample purifier facilitates separation of plasma or serum from cellular components of a blood sample. In some embodiments, the sample purifier facilitates separation of plasma or serum from cellular components of a blood sample before starting a molecular amplification reaction or a sequencing reaction. Plasma or serum separation is achieved by several different methods such as centrifugation, sedimentation or filtration. In some embodiments, the sample purifier comprises a filter matrix for receiving whole blood, the filter matrix having a pore size that is prohibitive for cells to pass through, while plasma or serum can pass through the filter matrix uninhibited. In some embodiments, the filter matrix combines a large pore size at the top with a small pore size at the bottom of the filter, which leads to very gentle treatment of the cells preventing cell degradation or lysis, during the filtration process. This is advantageous because cell degradation or lysis would result in release of nucleic acids from blood cells or maternal cells that would contaminate target cell-free nucleic acids. Non-limiting examples of such filters include Pall Vivid™ GR membrane, Munktell Ahlstrom filter paper, and TeraPore filters.

[0158] In some embodiments a vertical filtration system is used to facilitate separation of plasma or serum from a cellular component of a blood sample. In this instance, the filtration is driven by capillary force to separate a component or fraction from a sample (e.g., plasma from blood). By way of non-limiting example, vertical filtration may comprise gravitation assisted plasma separation. A high-efficiency superhydrophobic plasma separator is described, e.g., by Liu et al., A High Efficiency Superhydrophobic Plasma Separation, Lab Chip 2015.

[0159] In some embodiments, the sample purifier comprises a lateral filter (e.g., sample does not move in a gravitational direction or the sample moves perpendicular to a gravitational direction). The sample purifier may comprise a vertical filter (e.g., sample moves in a gravitational direction). The sample purifier may comprise vertical filter and a lateral filter. The sample purifier may be configured to receive a sample or portion thereof with a vertical filter, followed by a lateral filter. The sample purifier may be configured to receive a sample or portion thereof with a lateral filter, followed by a vertical filter. In some embodiments, a vertical filter comprises a filter matrix. In some embodiments, the filter matrix of the vertical filter comprises a pore with a pore size that is prohibitive for cells to pass through, while plasma can pass the filter matrix uninhibited. In some embodiments, the filter matrix comprises a membrane that is especially suited for this application because it combines a large pore size at the top with a small pore size at the bottom of the filter, which leads to very gentle treatment of the cells preventing cell degradation during the filtration process.

[0160] In some embodiments, the filter comprises a material that moves, draws, pushes, or pulls the biological sample through the filter. In some embodiments, the material is a wicking material. Examples of appropriate materials used in the sample purifier to remove cells include, but are not limited to, polyvinylidene difluoride, polytetrafluoroethylene, acetylcellulose, nitrocellulose, polycarbonate, polyethylene terephthalate, polyethylene, polypropylene, glass fiber, borosilicate, vinyl chloride, or silver. In some embodiments, the separation material is a hydrophobic filter, for example a glass fiber filter, a composite filter, for example Cytosep (e.g., Ahlstrom Filtration or Pall Specialty Materials, Port Washington, N.Y.), or a hydrophilic filter, for example cellulose (e.g., Pall Specialty Materials). In some embodiments, whole blood is fractionated into red blood cells, white blood cells and serum components for further processing according to the methods of the present disclosure using a commercially available kit (e.g., Arrayit Blood Card Serum Isolation Kit, Cat. ABCS, Arrayit Corporation, Sunnyvale, Calif.).

[0161] In some embodiments, the sample purifier comprises at least one filter or at least one membrane characterized by at least one pore size. In some embodiments, at least one pore size of at least one filter is about 0.05 microns to about 10 microns. In some embodiments, the pore size is about 0.05 microns to about 8 microns. In some embodiments, the pore size is about 0.05 microns to about 6 microns. In some embodiments, the pore size is about 0.05 microns to about 4 microns. In some embodiments, the pore size is about 0.05 microns to about 2 microns. In some embodiments, the pore size is about 0.05 microns to about 1 micron. In some embodiments, at least one pore size of at least one filter is about 0.1 microns to about 10 microns. In some embodiments, the pore size is about 0.1 microns to about 8 microns. In some embodiments, the pore size is about 0.1 microns to about 6 microns. In some embodiments, the pore size is about 0.1 microns to about 4 microns. In some embodiments, the pore size is about 0.1 microns to about 2 microns. In some embodiments, the pore size is about 0.1 microns to about 1 micron.

[0162] In some embodiments, the sample processor is configured to separate blood cells from whole blood. In some embodiments, the sample processor is configured to isolate plasma from whole blood. In some embodiments, the sample processor is configured to isolate serum from whole blood. In some embodiments, the sample processor is configured to isolate plasma or serum from less than 1 milliliter of whole blood. In some embodiments, the sample processor is configured to isolate plasma or serum from less than 1 milliliter of whole blood. In some embodiments, the sample processor is configured to isolate plasma or serum from less than 500 microliters (μL) of whole blood. In some embodiments, the sample processor is configured to isolate plasma or serum from less than 400 μL of whole blood. In some embodiments, the sample processor is configured to isolate plasma or serum from less than 300 μL of whole blood. In some embodiments, the sample processor is configured to isolate plasma or serum from less than 200 μL of whole blood. In some embodiments, the sample processor is configured to isolate plasma or serum from less than 150 μL of whole blood. In some embodiments, the sample processor is configured to isolate plasma or serum from less than 100 μL of whole blood.

[0163] Disclosed herein, in some embodiments, are devices comprising a detection zone. In some embodiments, the detection zone comprises a test region and a control region. In some embodiments, the imaging device captures an image of the detection zone. In some embodiments, the control region is a positive control. In some embodiments, the control region is a negative control. In some embodiments, the control region comprises a positive and a negative control.

[0164] In some embodiments, multiple test regions are provided in the detection zone. In some embodiments, the detection zone comprises a first test region comprising a competition assay assembly to measure a presence of neutralizing antibodies in a patient sample against a first SARS-CoV-2 spike protein receptor binding domain (RBD). The first test region, in some embodiments, comprises a first capture molecule described herein. In some embodiments, the first capture molecule comprises an amino acid sequence that is at least 95% identical to SEQ ID NO: 3. In some embodiments, the competition assay assembly further comprises a peptide-conjugate comprising a peptide derived from a cognate receptor of the spike protein (e.g., human ACE2) conjugated to a detectable moiety.

[0165] In some embodiments, the detection zone comprises a second test region comprising a second competition assay assembly to measure a presence of neutralizing antibodies in a patient sample against a second SARS-CoV-2 spike protein RBD that differs from the first SARS-CoV-2 spike protein RBD by at least 1 amino acid. In some embodiments, the first SARS-CoV-2 spike protein RBD and the second SARS-CoV-2 spike protein RBD differ by at least 2 amino acids. In some embodiments, the first SARS-CoV-2 spike protein RBD and the second SARS-CoV-2 spike protein RBD differ by at least 3, 4, 5, 6, 7, 8, 9, or 10 amino acids.

[0166] In some embodiments, the second test region comprises a second assay assembly configured to measure total antibodies (e.g., neutralizing or otherwise) against SARS-CoV-2 or another virus. In some embodiments, the second assay assembly comprises a capture molecule that binds to anti-nucleocapsid IgG or IgM, anti-spike RBD IgG or IgM, anti-Spike SiS2 IgG or IgM, anti-spike S2 IgG or IgM, anti-spike S1 IgG or IgM, or a combination thereof. In some embodiments, the capture molecule binds to anti-nucleocapsid IgG or IgM for SARS-CoV, anti-S1 IgG or IgM for MERS, anti-H1 IgG or IgM for influenza and anti-H3 IgG or IgM for influenza.

[0167] In some embodiments, the testing device comprises multiple detection zones. In some embodiments, the testing device comprises a first detection zone and a second detection zone. In some embodiments, the first detection zone comprises the first and second testing regions described herein. In some embodiments, the first and second detection zones are partially enclosed in a single housing. In some embodiments, the first and second detection zones are not enclosed in a single housing. The testing device of the present disclosure may comprise any number of detection zones or testing regions, depending on the desired output. In some embodiments, the testing device comprises at least 2, 3, 4, 5, 6, 7, 8, 9, or 10 detection zones. In some embodiments, at least one of the detection zones comprises at least 2, 3, 4, 5, 6, 7, 8, 9, or 10 testing regions. In some embodiments, the detection zones are partially enclosed in a single housing. In some embodiments, the detection zones are not enclosed in a single housing.

### Biological Sample Medium

[0168] A biological sample medium (BSM) may be used to store a biological sample to be assayed using the testing devices, systems or methods described herein. In some embodiments, the BSM is a dried blood spot card (DBS). Referring to FIG. 12B, in some embodiments, the BSM 1201 may comprise one or more regions 1205 for containing the one or more biological sample(s). In some embodiments, the one or more regions may comprise at least 2, 3, 4, 5, 6, 7, 8, 9, 10, or more regions. In some embodiments, the one or more regions may comprise no more than 2, 3, 4, 5, 6, 7, 8, 9, or 10 regions. In some embodiments, the one or more regions may comprise 2 to 5 regions (e.g., 2, 3, 4, or 5). In some embodiments, the one or more regions 1205 may comprise spatially distinct adjacent regions. In some embodiments, the biological sample(s) stored on the BSM may comprise two or more biological samples. In some embodiments, the one or more regions may comprise at least 2, 3, 4, 5, 6, 7, 8, 9, 10, or more samples. In some embodiments, the one or more regions may comprise no more than 2, 3, 4, 5, 6, 7, 8, 9, or 10 samples. In some embodiments, the one or more regions may comprise 2 to 5 samples (e.g., 2, 3, 4, or 5).

[0169] Still referring to FIG. 12B, in some embodiments, the BSM may comprise a sealable member 1207 to protect the one or more regions of one or more deposited biological sample 1205 during transport of the BSM. As shown in FIG. 12A-12B, in some embodiments, the BSM may comprise subject identifying information associated with a barcode 1202, numeric 1203, text-based characters 1204, RFID 1206, or any combination thereof to identify the subject from whom the one or more biological samples originated. As shown in FIG. 12C, in some embodiments, the BSM may comprise a fillable region 1208 for a subject to provide answers to a survey related to the health of the subject, including for example symptoms related to an infection by a pathogen of interest (e.g., SARS-CoV-2).

[0170] In some embodiments, the fillable region is positions on a dried spot card (DSC). In some embodiments, the survey may include one or more clinical questions 1210 pertaining to a symptom associated with an infection by a pathogen of interest. In some embodiments, the BSM may comprise a survey specific to coronavirus symptoms. In some embodiments, the associated symptoms may include cough, nasal congestion, chest pain, headache, diarrhea, vomiting, difficulty breathing or any combination thereof. In some embodiments, the survey may comprise a response severity scale 1211 of associated symptoms. In some embodiments, said severity scale may include terminology to indicate symptoms never present, sometimes present, often present, or present every day. In some embodiments, clinical questions may include indicating whether or not the subject has been exposed to a second subject whom has confirmed contracting one or more viruses or microbes. In some embodiments, clinical questions may further comprise a unique computer recognizable code 1209 (e.g. QR code, alpha numeric character, RFID or any combination thereof) that a computer software image processing algorithm may recognize, and associate said medical differential diagnosis survey response with. In some embodiments, a computer software image processing algorithm may further provide a combined interpretation of a subject's assay results in view of survey severity scale responses.

[0171] As referred to in FIG. 14, the systems and methods described herein, in some embodiments may perform steps on a BSM including: (a) providing a stack of uniformly oriented BSMs 1401; (b) reading the BSM barcode 1402, (c) opening the BSM to expose biological sample(s) 1403, (d) reading BSM patient info 1404, (e) identifying a region on the BSM 1405, (f) punching the biological sample spot 1406, (g) dropping the punch into a well of a multi-well microtiter plate 1407, (h) confirming the position of punch sample in the well 1408, (i) repeating steps (a)-(h) until sufficient biological samples have been punched 1409, (j) stacking the multi-well microtiter plates 1410, (k) transferring the stacked multi-well microtiter plates to the automated centralizing assay system 1411, (l) folding the BSM for storage 1412 or any combination thereof. One or more of the steps performed by the system may be automated.

### Automated and Centralizing Systems

[0172] In some embodiments, the systems described herein are automated high throughput systems. In some embodiments, the systems described may comprise an automated system capable of: (a) receiving and processing a biological sample in preparation for assaying, and (b) conducting the assay. In some embodiments, one or more of (a) or (b) is automated. In some embodiments, (a) and (b) are automated. For example, an automated system may comprise system components operated by one or more robots. In some embodiments, the system components are otherwise in mechanical, electrical, fluidic or optical communication with one another such that human intervention is not necessary to perform the disclosed functions. Such automated systems may be capable of completing the methods disclosed herein with or without the intervention of a human user. In some embodiments, the systems utilize a BSM comprising the biological sample to be assayed with the system.

Biological Sample Processor. As shown in FIG. 13, in some embodiments, the systems disclosed herein comprise a biological sample (BS) processor 1302 and an assay assembly block 1309. In some embodiments, the BS processor comprises: (a) a BS receiver 1303; (b) a BS scanner 1304; (c) a BS separator 1305; (d) BS imager 1306; (e) BS chemical extractor 1307; and (f) a BS purifier 1308. In some embodiments, the biological sample may be contained within a BSM and further processed by the high throughput system.

[0173] In some embodiments, the BS receiver 1303 may mechanically manipulate the BS through linear translation or rotation of the BS to properly position the BS for further processing. In some embodiments, the BS receiver comprises a receptacle for a container (e.g., a vial, 96 well plate). In some embodiments, BS receiver is a crate with multiple receptacles for containers. In some embodiments, the BS receiver comprises a mechanical arm with a distal hand-like member configured to hold the container and transfer the container to the BS scanner to be scanned.

[0174] In some embodiments, the BS processor 1302 may comprise a BS scanner 1304 in electrical communication with the BS processor 1302. In some embodiments, the BS scanner 1304 may interpret and record subject identifying information on the BS. In some embodiments, the BS scanner 1304 may scan identifying information provided in, for example, barcode 1202, numeric 1203, text-based characters 1204, RFID 1206 or any combination thereof, as shown in FIG. 12A.

[0175] In some embodiments, the BS processor 1302 may further comprise a BS separator 1305 capable of mechanically separating a segment of the BS. In the case where the BS is stored on a BSM, such as a dried blood spot card, the BS separator 1305 may comprise a cutting tool that isolates a segment of the BSM containing the BS. In some embodiments, the cutting tool may comprise a knife or a punch. In some embodiments, the punch comprises a plurality of diameters. In some embodiments, the punch outer-diameter may be at least 2, 3, 4, 5, 6, 7, 8, 9, 10 or more millimeters. In some embodiments, the punch outer-diameter may comprise no more than 2, 3, 4, 5, 6, 7, 8, 9, or 10 millimeters. In some embodiments, the one or more punched segments of BS may be placed into an assay chamber for further processing. In some embodiments, such as when the BS is stored in a container (e.g., a vial), the BS separator may be a syringe or a needle for isolating a portion of the BS to be assayed. In some embodiments, the BS separator 1305 may aspirate a segment of the BS using a needle. In some embodiments, the needle may be 18 AWG, 19AWG, 20AWG, 21AWG, 22AWG, 23AWG, 24AWG, 25AWG, 26AWG, 27AWG, or 28 AWG. In some embodiments, the one or more aspirated segment of BS may be placed into an assay chamber for further processing the BS. In some embodiments, the BS processor 1302 may further comprise a BS imager 1306 that may provide quality control feedback position of the BS in the assay chamber to ensure proper processing. After proper placement of one or more segments of BS in the assay chamber, the BS may then be catalogued and stored to be referenced in the future.

[0176] In some embodiments, the assay chamber may comprise a well plate. In some embodiments, the well plate may be a 96-well, 384-well, or a 1536-well plate. In some embodiments, the well plate may be a microtiter well plate. In some embodiments, the assay chamber comprises a unique identifier that may be recognized as it moves between the biological sample processor 1302 and the assay assembly block 1309 described herein. In some embodiments, after successful placement of the one or more BS segments in the assay chamber, the BS may be further processed by the biological sample processor 1302 in preparation for assaying

[0177] Biological Sample Preparation. Biological sample preparation, in some embodiments, is accomplished by a (a) BS chemical extractor 1307 and (b) a BS purifier 1308. Suitable buffers that may be used to elute the BS from the BSM includes phosphate-buffered saline (PBS). In some embodiments, the BS chemical extractor 1307 may be capable of eluting the BS to isolate the BS (e.g., from a biological sample medium). In some embodiments, the chemical extractor elutes the BS from a biological sample medium in the assay chamber. In some embodiments, the BS chemical extractor 1307 may be in fluidic communication with one or more reservoirs of elution buffers and the assay chamber to dispense elution buffer as needed into the assay chamber. In some embodiments, the assay chamber containing the elution buffer and BS may be agitated by mechanical shaking to facilitate the elution process. In some embodiments, the eluted BS may be purified by the BS purifier 1308 prior to transferring the assay chamber to the assay assembly block 1309. In some embodiments the purification process may comprise centrifugation to isolate BS by density. In some embodiments, upon sufficient BS processing, the biological sample processor 1302 may mechanically transfer the assay chamber to the assay assembly block 1309.

[0178] Assaying the Biological Sample. Assaying the biological sample, in some embodiments, may be accomplished by an assay assembly block 1309. In some embodiments, the assay assembly block comprises: (a) BS Diluter 1310 and (b) BS assay conductor 1311. In some embodiments, the BS diluter 1310 may be in fluidic communication with the assay chamber to prepare the serial dilutions of the BS. In some embodiments, assay chamber identification may be interpreted by the assay assembly block to indicate which assay to conduct on which BS. In some embodiments, upon completion of the assay by the BS assay conductor 1311, the assay results 1312 will be saved with respect to the identification of the assay chamber and more broadly the subject providing the biological sample assayed.

[0179] In some embodiments, the system comprises the use of a preprogramed and automated robotics to perform one or more of the steps above, including the assays described herein. In some embodiments, the automated centralizing assay system comprises the use of preprogramed and automated robotics to perform the assay comprising a lateral flow assay, agglutination assay, ELISA, or FRET assay as described herein. In some embodiment, the system is capable of performing at least or about 40,000, 50,000, 60,000, 70,000, 80,000, 90,000, or more than 100,000 tests per day. In some embodiments, the system utilizes small volumes of reagents, such as less than 100 nL, less than 90 nL, less than 80 nL, less than 70 nL, less than 60 nL, or less than 50 nL of reagents. In some embodiments, the system performs the assay (e.g., a solution-based assay) in a vessel, such as a container or a test tube. In some embodiments, the system performs the assay (e.g., a solution-based assay) in an assay plate, such as a 96-well plate, a 384-well plate, or a 1536-well plate.

[0180] In some embodiments, the biological sample (e.g., blood from a finger prick) is stored in or on a BSM, such as a DSC, described herein. The biological sample is removed from the BSM and placed into the vessel (e.g., a well of a 96-well plate) to be eluted from the BSM. Next, the eluted biological sample is assayed using an assay (e.g., FRET, ELISA) described herein deposited on a solid surface.

[0181] In some embodiments, biological samples are collected from the subjects via the use of blood or sample collection cards. The biological samples is tested by the automated centralizing assay system. In some embodiments, the blood or sample collection card comprises multiple slots for the blood or sample collection. In such instances, the biological sample from each slot is tested separately by a different assay method. For example, a blood collection card (i.e. a blood spot card) comprises five slots that is tested by the automated centralizing assay system performing fives assays such as lateral flow assay, an ELISA, a biomarker panel, a qPCR, and a neutralizing antibody titer assay. In some embodiments, the same assay is performed multiple times (e.g., duplicates) to ensure accuracy of the results. In some embodiments, the assay is performed at least 2, 3, 4, 5, 6, 7, 8, 9, or 10 times. In some embodiments, multiple dilutions are tested, for e.g., 1:40, 1:80, 1:160, and 1:320 dilutions are tested at the same time. In some embodiments, the dilutions tested are one or more of 1:5, 1:10, 1:15, 1:20, 1:25, 1:30, 1:35, 1:40, 1:45, 1:50, 1:55, or 1:60, 1:65, 1:70, 1:75, 1:80, 1:85, 1:90, 1:95, 1:100, 1:100, 1:105, 1:110, 1:115, 1:120, 1:125, 1:130, 1:135, 1:140, 1:145, 1:150, 1:155, 1:160, 1:165, 1:170, 1:175, 1:180, 1:185, 1:190, 1:195, 1:200, 1:205, 1:210, 1:215, 1:220, 1:225, 1:230, 1:235, 1:240, 1:245, or 1:250. In some embodiments, at least 2, 3, 4, 5, 6, 7, 8, 9, or 10 different dilutions are tested simultaneously.

[0182] In some embodiments, the automated centralizing assay system confirms the efficacy or effectiveness of a vaccine in a population. In some embodiments, the biological samples are collected from a population before and after the population is vaccinated. In some embodiments, additional biological samples are collected at any time frame or frequency described herein to confirm presence and sufficient quantity of neutralizing antibody (induced by the vaccine) in the population. In some embodiment, the automated centralizing assay system can prognose immunity or measure susceptibility of the population to any one of the pathogen described herein by confirming the absence or insufficient quantity of neutralizing antibody in the population. In some embodiments, the automated centralizing assay system confirms presence, absence, or quantity of the neutralizing antibody described herein from a subject's biological sample. In some instances, the automated centralizing assay system prognoses a subject's immunity to any one of the pathogen described herein. In some embodiments, the automated centralizing assay system prognoses a subject's immunity to coronavirus. In some embodiments, the automated centralizing assay system prognoses a subject's immunity to SARS-CoV-2. In some embodiments, the automated centralizing assay system measures the subject's susceptibility to an infection by any one of the pathogens described herein. In some embodiments, the automated centralizing assay system measures the subject's susceptibility to an infection by coronavirus. In some embodiments, the automated centralizing assay system measures the subject's susceptibility to an infection by SARS-CoV-2. In some embodiments, the automated centralizing assay system identifies individuals in a population that respond to a vaccine and individuals in a population that do not respond to a vaccine. In some embodiments, the automated centralizing assay system minimizes or reduces the risk associated with usage of a commercialized vaccine in a population (e.g., by identifying individuals that do not respond to the vaccine). In some embodiments, the automated centralizing assay system identifies neutralizing antibodies as a surrogate marker of protection from a vaccine (e.g., in place of traditional, randomized, placebo-controlled trials). In some embodiments, the automated centralizing assay system classifies vaccines by % efficacy in a population.

[0183] In some embodiments, the automated centralizing assay systems provided herein have an accuracy of at least 80%, for example, at least 85%, at least 86%, at least 87%, at least 88%, at least 89%, at least 90%, at least 91%, at least 92%, at least 93%, at least 94%, at least 95%, at least 96%, at least 97%, at least 98%, at least 99%, or greater. In some embodiments, the automated centralizing assay systems provided herein have a sensitivity of at least 80%, for example, at least 85%, at least 86%, at least 87%, at least 88%, at least 89%, at least 90%, at least 91%, at least 92%, at least 93%, at least 94%, at least 95%, at least 96%, at least 97%, at least 98%, at least 99%, or greater. In some embodiments, the automated centralizing assay systems provided herein have a specificity of at least 80%, for example, at least 85%, at least 86%, at least 87%, at least 88%, at least 89%, at least 90%, at least 91%, at least 92%, at least 93%, at least 94%, at least 95%, at least 96%, at least 97%, at least 98%, at least 99%, or greater.

### Computer-Implemented Systems

[0184] Disclosed herein, in some embodiments, are systems. Referring to FIG. 5, the system 500 comprises, in some embodiments, a testing device, an imaging device 501, and a computing device, for determining whether a subject is immune to an infection by a pathogen of interest (e.g., SARS-CoV-2). The imaging device and/or the computing device are configured to receive and analyze data generated by the testing device and/or one or more external devices, to provide a result to the subject. The result is provided to the subject via a graphical user interface (GUI) by the imaging device and/or computing device using an application (web application or mobile application). Systems further comprise one or more data store for storing and retrieving the data.

[0185] Disclosed herein, in some embodiments, are data analyzed by one or more components of the system described herein. In some embodiments, the data are structured or unstructured. In some embodiments, the data are generated by the imaging device when an image is captured of the detection zone of the testing devices described herein. In some embodiments, the data are external data generated from an external device. In some embodiments, the external device comprises a diagnostic device, a prognostic device, or a health or fitness tracking device. In some embodiments, the external data comprises body temperature, heart rate variability, resting heart rate, sleep quality, or sleep quantity, or a combination thereof.

[0186] Provided here, in some embodiments, are imaging devices for capturing an image of the detection zone of the testing devices described herein. In some embodiments, the imaging device is a camera. In some embodiments, the imaging device is a computing device with a camera, such as a smartphone, laptop, or tablet. In some embodiments, the imaging device is not a computing device, but is in communication with the computing device via a communication network. In some embodiments, the communication network is wireless, such as wireless Internet or Bluetooth.

[0187] Referring to FIG. 5, the system 500 comprises an imaging device 501, an external device 502, a data store 505, all in communication via a communication network 503, equipped with cloud-based computing executed by the data analytics module 507 and communications module 508. In this example, the imaging device transmits data from an image captured of the detection zone of the testing device described herein, via the communication network, to the data analytics module 507 in the cloud 506 to be analyzed. The data analytics module 507 transmits the result to the communications module 508 to be packaged for display to the user. In this example, the result is displayed on the imaging device 501, which is a personal electronic device belonging to the user (e.g., the subject in this example). The data store 505 is a remote server in this example. Alternatively, the data store is a cloud-based data store.

[0188] Also provided, in some embodiments, are computing devices comprising a computing system configured to analyze data described herein to provide a result. Referring to FIG. 6, a block diagram is shown depicting an exemplary computing device that includes a computing system 600 (e.g., a processing or computing system) within which a set of instructions can execute for causing a device to perform or execute any one or more of the aspects and/or methodologies for static code scheduling of the present disclosure. The components in FIG. 6 are examples only and do not limit the scope of use or functionality of any hardware, software, embedded logic component, or a combination of two or more such components implementing particular embodiments.

[0189] Computer system 600 can include one or more processors 601, a memory 603, and a storage 608 that communicate with each other, and with other components, via a bus 640. The bus 640 can also link a display 632, one or more input devices 633 (which may, for example, include a keypad, a keyboard, a mouse, a stylus, etc.), one or more output devices 634, one or more storage devices 635, and various tangible storage media 636. All of these elements can interface directly or via one or more interfaces or adaptors to the bus 640. For instance, the various tangible storage media 636 can interface with the bus 640 via storage medium interface 626. Computer system 600 can have any suitable physical form, including but not limited to one or more integrated circuits (ICs), printed circuit boards (PCBs), mobile handheld devices (such as mobile telephones or PDAs), laptop or notebook computers, distributed computer systems, computing grids, or servers.

[0190] Computer system 600 includes one or more processor(s) 601 (e.g., central processing units (CPUs) or general purpose graphics processing units (GPGPUs)) that carry out functions. Processor(s) 601 optionally contains a cache memory unit 602 for temporary local storage of instructions, data, or computer addresses. Processor(s) 601 are configured to assist in execution of computer readable instructions. Computer system 600 can provide functionality for the components depicted in FIG. 6 as a result of the processor(s) 601 executing non-transitory, processor-executable instructions embodied in one or more tangible computer-readable storage media, such as memory 603, storage 608, storage devices 635, and/or storage medium 636. The computer-readable media can store software that implements particular embodiments, and processor(s) 601 can execute the software. Memory 603 can read the software from one or more other computer-readable media (such as mass storage device(s) 635, 636) or from one or more other sources through a suitable interface, such as network interface 620. The software can cause processor(s) 601 to carry out one or more processes or one or more steps of one or more processes described or illustrated herein. Carrying out such processes or steps can include defining data structures stored in memory 603 and modifying the data structures as directed by the software.

[0191] The memory 603 can include various components (e.g., machine readable media) including, but not limited to, a random access memory component (e.g., RAM 604) (e.g., static RAM (SRAM), dynamic RAM (DRAM), ferroelectric random access memory (FRAM), phase-change random access memory (PRAM), etc.), a read-only memory component (e.g., ROM 605), and any combinations thereof. ROM 605 can act to communicate data and instructions unidirectionally to processor(s) 601, and RAM 604 can act to communicate data and instructions bidirectionally with processor(s) 601. ROM 605 and RAM 604 can include any suitable tangible computer-readable media described below. In one example, a basic input/output system 606 (BIOS), including basic routines that help to transfer information between elements within computer system 600, such as during start-up, is stored in the memory 603.

[0192] Fixed storage 608 is connected bidirectionally to processor(s) 601, optionally through storage control unit 607. Fixed storage 608 provides additional data storage capacity and can also include any suitable tangible computer-readable media described herein. Storage 608 is used to store operating system 609, executable(s) 610, data 611, applications 612 (application programs), and the like. Storage 608 can also include an optical disk drive, a solid-state memory device (e.g., flash-based systems), or a combination of any of the above. Information in storage 608 may, in appropriate cases, be incorporated as virtual memory in memory 603.

[0193] In one example, storage device(s) 635 is removably interfaced with computer system 600 (e.g., via an external port connector (not shown)) via a storage device interface 625. Particularly, storage device(s) 635 and an associated machine-readable medium can provide non-volatile and/or volatile storage of machine-readable instructions, data structures, program modules, and/or other data for the computer system 600. In one example, software can reside, completely or partially, within a machine-readable medium on storage device(s) 635. In another example, software can reside, completely or partially, within processor(s) 601.

[0194] Bus 640 connects a wide variety of subsystems. Herein, reference to a bus can encompass one or more digital signal lines serving a common function, where appropriate. Bus 640 is any of several types of bus structures including, but not limited to, a memory bus, a memory controller, a peripheral bus, a local bus, and any combinations thereof, using any of a variety of bus architectures. As an example and not by way of limitation, such architectures include an Industry Standard Architecture (ISA) bus, an Enhanced ISA (EISA) bus, a Micro Channel Architecture (MCA) bus, a Video Electronics Standards Association local bus (VLB), a Peripheral Component Interconnect (PCI) bus, a PCI-Express (PCI-X) bus, an Accelerated Graphics Port (AGP) bus, HyperTransport (HTX) bus, serial advanced technology attachment (SATA) bus, and any combinations thereof.

[0195] Computer system 600 can also include an input device 633. In one example, a user of computer system 600 can enter commands and/or other information into the computer system 600 via input device(s) 633. Examples of an input device(s) 633 include, but are not limited to, an alpha-numeric input device (e.g., a keyboard), a pointing device (e.g., a mouse or touchpad), a touchpad, a touch screen, a multi-touch screen, a joystick, a stylus, a gamepad, an audio input device (e.g., a microphone, a voice response system, etc.), an optical scanner, a video or still image capture device (e.g., a camera), and any combinations thereof. In some embodiments, the input device is a Kinect, Leap Motion, or the like. Input device(s) 633 is interfaced to bus 640 via any of a variety of input interfaces 623 (e.g., input interface 623) including, but not limited to, serial, parallel, game port, USB, FIREWIRE, THUNDERBOLT, or any combination of the above.

[0196] In particular embodiments, when computer system 600 is connected to network 630, computer system 600 can communicate with other devices, specifically mobile devices and enterprise systems, distributed computing systems, cloud storage systems, cloud computing systems, and the like, connected to network 630. Communications to and from computer system 600 is sent through network interface 620. For example, network interface 620 can receive incoming communications (such as requests or responses from other devices) in the form of one or more packets (such as Internet Protocol (IP) packets) from network 630, and computer system 600 can store the incoming communications in memory 603 for processing. Computer system 600 can similarly store outgoing communications (such as requests or responses to other devices) in the form of one or more packets in memory 603 and communicated to network 630 from network interface 620. Processor(s) 601 can access these communication packets stored in memory 603 for processing.

[0197] Examples of the network interface 620 include, but are not limited to, a network interface card, a modem, and any combination thereof. Examples of a network 630 or network segment 630 include, but are not limited to, a distributed computing system, a cloud computing system, a wide area network (WAN) (e.g., the Internet, an enterprise network), a local area network (LAN) (e.g., a network associated with an office, a building, a campus or other relatively small geographic space), a telephone network, a direct connection between two computing devices, a peer-to-peer network, and any combinations thereof. A network, such as network 630, can employ a wired and/or a wireless mode of communication. In general, any network topology is used.

[0198] Information and data is displayed through a display 632. Examples of a display 632 include, but are not limited to, a cathode ray tube (CRT), a liquid crystal display (LCD), a thin film transistor liquid crystal display (TFT-LCD), an organic liquid crystal display (OLED) such as a passive-matrix OLED (PMOLED) or active-matrix OLED (AMOLED) display, a plasma display, and any combinations thereof. The display 632 can interface to the processor(s) 601, memory 603, and fixed storage 608, as well as other devices, such as input device(s) 633, via the bus 640. The display 632 is linked to the bus 640 via a video interface 622, and transport of data between the display 632 and the bus 640 is controlled via the graphics control 621. In some embodiments, the display is a video projector. In some embodiments, the display is a head-mounted display (HMD) such as a VR headset. In further embodiments, suitable VR headsets include, by way of non-limiting examples, HTC Vive, Oculus Rift, Samsung Gear VR, Microsoft HoloLens, Razer OSVR, FOVE VR, Zeiss VR One, Avegant Glyph, Freefly VR headset, and the like. In still further embodiments, the display is a combination of devices such as those disclosed herein.

[0199] In addition to a display 632, computer system 600 can include one or more other peripheral output devices 634 including, but not limited to, an audio speaker, a printer, a storage device, and any combinations thereof. Such peripheral output devices is connected to the bus 640 via an output interface 624. Examples of an output interface 624 include, but are not limited to, a serial port, a parallel connection, a USB port, a FIREWIRE port, a THUNDERBOLT port, and any combinations thereof.

[0200] In addition or as an alternative, computer system 600 can provide functionality as a result of logic hardwired or otherwise embodied in a circuit, which can operate in place of or together with software to execute one or more processes or one or more steps of one or more processes described or illustrated herein. Reference to software in this disclosure can encompass logic, and reference to logic can encompass software. Moreover, reference to a computer-readable medium can encompass a circuit (such as an IC) storing software for execution, a circuit embodying logic for execution, or both, where appropriate. The present disclosure encompasses any suitable combination of hardware, software, or both.

[0201] Those of skill in the art will appreciate that the various illustrative logical blocks, modules, circuits, and algorithm steps described in connection with the embodiments disclosed herein is implemented as electronic hardware, computer software, or combinations of both. To clearly illustrate this interchangeability of hardware and software, various illustrative components, blocks, modules, circuits, and steps have been described above generally in terms of their functionality.

[0202] The various illustrative logical blocks, modules, and circuits described in connection with the embodiments disclosed herein is implemented or performed with a general purpose processor, a digital signal processor (DSP), an application specific integrated circuit (ASIC), a field programmable gate array (FPGA) or other programmable logic device, discrete gate or transistor logic, discrete hardware components, or any combination thereof designed to perform the functions described herein. A general purpose processor is a microprocessor, but in the alternative, the processor is any conventional processor, controller, microcontroller, or state machine. A processor can also be implemented as a combination of computing devices, e.g., a combination of a DSP and a microprocessor, a plurality of microprocessors, one or more microprocessors in conjunction with a DSP core, or any other such configuration.

[0203] The steps of a method or algorithm described in connection with the embodiments disclosed herein is embodied directly in hardware, in a software module executed by one or more processor(s), or in a combination of the two. A software module can reside in RAM memory, flash memory, ROM memory, EPROM memory, EEPROM memory, registers, hard disk, a removable disk, a CD-ROM, or any other form of storage medium known in the art. An exemplary storage medium is coupled to the processor such that the processor can read information from, and write information to, the storage medium. In the alternative, the storage medium is integral to the processor. The processor and the storage medium can reside in an ASIC. The ASIC can reside in a user terminal. In the alternative, the processor and the storage medium can reside as discrete components in a user terminal.

[0204] In accordance with the description herein, suitable computing devices include, by way of non-limiting examples, server computers, desktop computers, laptop computers, notebook computers, sub-notebook computers, netbook computers, netpad computers, set-top computers, media streaming devices, handheld computers, smart phones, Internet appliances, mobile smartphones, tablet computers, personal digital assistants, video game consoles, and vehicles. Those of skill in the art will also recognize that select televisions, video players, and digital music players with optional computer network connectivity are suitable for use in the system described herein. Suitable tablet computers, in various embodiments, include those with booklet, slate, and convertible configurations, known to those of skill in the art. In some embodiments, the smart phone is an Apple iPhone or an android device (e.g., Samsung Galaxy).

[0205] In some embodiments, the computing device includes an operating system configured to perform executable instructions. The operating system is, for example, software, including programs and data, which manages the device's hardware and provides services for execution of applications. Those of skill in the art will recognize that suitable server operating systems include, by way of non-limiting examples, FreeBSD, OpenBSD, NetBSD®, Linux, Apple® Mac OS X Server®, Oracle® Solaris®, Windows Server®, and Novell® NetWare®. Those of skill in the art will recognize that suitable personal computer operating systems include, by way of non-limiting examples, Microsoft Windows®, Apple® Mac OS X®, UNIX®, and UNIX-like operating systems such as GNU/Linux®. In some embodiments, the operating system is provided by cloud computing. Those of skill in the art will also recognize that suitable mobile smartphone operating systems include, by way of non-limiting examples, Nokia® Symbian® OS, Apple® iOS®, Research In Motion® BlackBerry OS®, Google® Android®, Microsoft® Windows Phone® OS, Microsoft® Windows Mobile® OS, Linux®, and Palm® WebOS®. Those of skill in the art will also recognize that suitable media streaming device operating systems include, by way of non-limiting examples, Apple TV®, Roku®, Boxee®, Google TV®, Google Chromecast®, Amazon Fire®, and Samsung® HomeSync®. Those of skill in the art will also recognize that suitable video game console operating systems include, by way of non-limiting examples, Sony® PS3®, Sony® PS4®, Microsoft® Xbox 360), Microsoft Xbox One, Nintendo® Wii®, Nintendo® Wii U®, and Ouya®.

[0206] Disclosed herein are computing systems comprising a data processor. In some embodiments, the data processor is a mobile processor. In some embodiments, the data processor is configured to receive data from an imaging device, an external device, or a data store, or a combination thereof. In some embodiments, data processor analyzes the data to provide a result. In some embodiments, the imaging device and the data processor are housed in the same device, such as a smartphone.

[0207] In some embodiments, the data processor is configured to provide a computer program or application, comprising a data analytics module. In some embodiments, the application is a web application. In some embodiments, the application is a mobile application. In some embodiments, the data analytics module is configured to receive data from an imaging device and analyze the data to provide a result. In some embodiments, the data analytics module is configured to receive external data from an external device. In some embodiments, the external data comprises body temperature, heart rate variability, resting heart rate, sleep quality, or sleep quantity, or a combination thereof. In some embodiments, the external device comprises a diagnostic device, a prognostic device, or a health or fitness tracking device. In some embodiments, the health tracking device is the Aurora®, Fitbit®, or Apple Watch. In some embodiments, systems comprise multiple external devices. In some embodiments, the data analytics module is configured to analyze the external data to provide a result. In some embodiments, the data analytics module is configured to analyze the external data and the data received from the imaging device to provide a result.

[0208] In some embodiments, the mobile application comprises a communication module. In some embodiments, the communication module is configured to communicate the result to the subject. In some embodiments, the communication module is configured to display the result to the subject via a graphical user interface (GUI) of an electronic device. In some embodiments, the electronic device is the imaging device described herein, the computing device described herein, or a combination thereof. In some embodiments, the electronic device is a smartphone, such as those described herein.

### Computer Program

[0209] Disclosed herein, in some embodiments, the data processor is configured to run a computer program. A computer program includes a sequence of instructions, executable by one or more processor(s) of the computing device's CPU, written to perform a specified task. Computer readable instructions is implemented as program modules, such as functions, objects, Application Programming Interfaces (APIs), computing data structures, and the like, that perform particular tasks or implement particular abstract data types. In light of the disclosure provided herein, those of skill in the art will recognize that a computer program is written in various versions of various languages.

[0210] The functionality of the computer readable instructions is combined or distributed as desired in various environments. In some embodiments, a computer program comprises one sequence of instructions. In some embodiments, a computer program comprises a plurality of sequences of instructions. In some embodiments, a computer program is provided from one location. In other embodiments, a computer program is provided from a plurality of locations. In various embodiments, a computer program includes one or more software modules. In various embodiments, a computer program includes, in part or in whole, one or more web applications, one or more mobile applications, one or more standalone applications, one or more web browser plug-ins, extensions, add-ins, or add-ons, or combinations thereof

[0211] In some embodiments, the computer programs described herein are configured to perform any one of the methods described herein. In some embodiments, the computer program is configured to analyze data obtained from an assay described herein (e.g., lateral flow assay, FRET assay) and provide a result based on the analysis of the data.

[0212] In some embodiments, the computer program is configured to confirm a the presence, absence, or quantity of the neutralizing antibody described herein from a subject's biological sample. In some instances, the computer program is configured to prognose a subject's immunity to any one of the pathogen described herein. In some embodiments, the computer program is configured to prognose a subject's immunity to coronavirus. In some embodiments, the computer program is configured to prognose a subject's immunity to SARS-CoV-2. In some embodiments, the computer program is configured to measure a subject's susceptibility to an infection by any one of the pathogen described herein. In some embodiments, computer program is configured to measure a subject's susceptibility to an infection by coronavirus. In some embodiments, the computer program is configured to measure a subject's susceptibility to an infection by SARS-CoV-2. In some embodiments, the computer program is configured to identify individuals in a population that respond to a vaccine and individuals in a population that do not respond to a vaccine. In some embodiments, the computer program is configured to identify neutralizing antibodies as a surrogate marker of protection from a vaccine. In some embodiments, the computer program is configured to classify a vaccine by % efficacy in a population. In some embodiments, the computer program is configured to minimize or reduce the risk associated with vaccine usage following market entry (e.g., by identifying individuals that do not respond to the vaccine).

### Non-Transitory Computer Readable Storage Medium

[0213] In some embodiments, the platforms, systems, media, and methods disclosed herein include one or more non-transitory computer readable storage media encoded with a program including instructions executable by the operating system of an optionally networked computing device. In further embodiments, a computer readable storage medium is a tangible component of a computing device. In still further embodiments, a computer readable storage medium is optionally removable from a computing device. In some embodiments, a computer readable storage medium includes, by way of non-limiting examples, CD-ROMs, DVDs, flash memory devices, solid state memory, magnetic disk drives, magnetic tape drives, optical disk drives, distributed computing systems including cloud computing systems and services, and the like. In some cases, the program and instructions are permanently, substantially permanently, semi-permanently, or non-transitorily encoded on the media

### Web Application

[0214] Disclosed here, in some embodiments, are data processors comprising one or more web applications. In light of the disclosure provided herein, those of skill in the art will recognize that a web application, in various embodiments, utilizes one or more software frameworks and one or more database systems. In some embodiments, a web application is created upon a software framework such as Microsoft®.NET or Ruby on Rails (RoR). In some embodiments, a web application utilizes one or more database systems including, by way of non-limiting examples, relational, non-relational, object oriented, associative, and XML database systems. In further embodiments, suitable relational database systems include, by way of non-limiting examples, Microsoft® SQL Server, mySQL™, and Oracle®. Those of skill in the art will also recognize that a web application, in various embodiments, is written in one or more versions of one or more languages. A web application is written in one or more markup languages, presentation definition languages, client-side scripting languages, server-side coding languages, database query languages, or combinations thereof. In some embodiments, a web application is written to some extent in a markup language such as Hypertext Markup Language (HTML), Extensible Hypertext Markup Language (XHTML), or eXtensible Markup Language (XML). In some embodiments, a web application is written to some extent in a presentation definition language such as Cascading Style Sheets (CSS). In some embodiments, a web application is written to some extent in a client-side scripting language such as Asynchronous Javascript and XML (AJAX), Flash® Actionscript, Javascript, or Silverlight®. In some embodiments, a web application is written to some extent in a server-side coding language such as Active Server Pages (ASP), ColdFusion®, Perl, Javam, JavaServer Pages (JSP), Hypertext Preprocessor (PHP), Python™, Ruby, Tcl, Smalltalk, WebDNA®, or Groovy. In some embodiments, a web application is written to some extent in a database query language such as Structured Query Language (SQL). In some embodiments, a web application integrates enterprise server products such as IBM® Lotus Domino®. In some embodiments, a web application includes a media player element. In various further embodiments, a media player element utilizes one or more of many suitable multimedia technologies including, by way of non-limiting examples, Adobe® Flash®, HTML 5, Apple® QuickTime®, Microsoft® Silverlight®, Java™, and Unity®

### Mobile Application

[0215] Also disclosed herein, in some embodiments, are data processors comprising one or more mobile applications. In some embodiments, the mobile application is provided to a mobile digital processing device at the time it is manufactured. In some embodiments, the mobile application is provided to a mobile digital processing device via the computer network described herein. Mobile applications disclosed herein are configured to locate, encrypt, index, and/or access information. Mobile applications disclosed herein are configured to acquire, encrypt, create, manipulate, index, and peruse data.

[0216] A mobile application is created by suitable techniques using hardware, languages, and development environments known to the art. Suitable programming languages include, by way of non-limiting examples, C, C++, C#, Objective-C, Java™, Javascript, Pascal, Object Pascal, Python™, Ruby, VB.NET, WML, and XHTML/HTML with or without CSS, or combinations thereof.

[0217] Suitable mobile application development environments are available from several sources. Commercially available development environments include, by way of non-limiting examples, AirplaySDK, alcheMo, Appcelerator®, Celsius, Bedrock, Flash Lite, .NET Compact Framework, Rhomobile, and WorkLight Mobile Platform. Other development environments are available without cost including, by way of non-limiting examples, Lazarus, MobiFlex, MoSync, and Phonegap. Also, mobile device manufacturers distribute software developer kits including, by way of non-limiting examples, iPhone and iPad (iOS) SDK, Android™ SDK, BlackBerry® SDK, BREW SDK, Palm® OS SDK, Symbian SDK, webOS SDK, and Windows® Mobile SDK.

[0218] Those of skill in the art will recognize that several commercial forums are available for distribution of mobile applications including, by way of non-limiting examples, Apple® App Store, Google® Play, Chrome WebStore, BlackBerry® App World, App Store for Palm devices, App Catalog for webOS, Windows® Marketplace for Mobile, Ovi Store for Nokia® devices, and Samsung® Apps.

### Standalone Application

[0219] Disclosed here, in some embodiments, are data processors comprising one or more standalone applications. A standalone application is an independent computer process; not an add-on to an existing process, e.g., not a plug-in. Those of skill in the art will recognize that standalone applications are often compiled. A compiler is a computer program(s) that transforms source code written in a programming language into binary object code such as assembly language or machine code. Suitable compiled programming languages include, by way of non-limiting examples, C, C++, Objective-C, COBOL, Delphi, Eiffel, Java™, Lisp, Python™, Visual Basic, and VB.NET, or combinations thereof. Compilation is often performed, at least in part, to create an executable program. In some embodiments, a computer program includes one or more executable complied applications.

### Software Modules

[0220] Disclosed herein, in some embodiments, the data processor comprises a computer program configured with one or more software modules. In some embodiments, the one or more software module is a data analytics module. In some embodiments, the one or more software module is a communication module.

[0221] In view of the disclosure provided herein, software modules are created by techniques known to those of skill in the art using machines, software, and languages known to the art. The software modules disclosed herein are implemented in a multitude of ways. In various embodiments, a software module comprises a file, a section of code, a programming object, a programming structure, or combinations thereof. In further various embodiments, a software module comprises a plurality of files, a plurality of sections of code, a plurality of programming objects, a plurality of programming structures, or combinations thereof. In various embodiments, the one or more software modules comprise, by way of non-limiting examples, a web application, a mobile application, and a standalone application. In some embodiments, software modules are in one computer program or application. In other embodiments, software modules are in more than one computer program or application. In some embodiments, software modules are hosted on one machine. In other embodiments, software modules are hosted on more than one machine. In further embodiments, software modules are hosted on a distributed computing platform such as a cloud computing platform. In some embodiments, software modules are hosted on one or more machines in one location. In other embodiments, software modules are hosted on one or more machines in more than one location

[0222] In some embodiments, the computing system described herein comprise a data analytics module. In some embodiments, the data analytics module is configured to run one or more algorithms. In some embodiments, the one or more algorithms comprise a machine learning algorithm. The machine learning algorithm is capable of supervised learning, unsupervised learning, reinforcement learning, semi-supervised learning, self-supervised learning, multi-instance learning, inductive learning, deductive inference, transduction learning, multi-task learning, active learning, online learning, transfer learning, or ensemble learning. In some embodiments, the data analytics module is configured with artificial intelligence (AI), such as a limited memory AI.

[0223] In some embodiments, the data analytics module receives data from the testing device, and optionally, external data from one or more external devices, and analyzes the data to provide a result. Referring to analysis of the data received from the testing device, the data analytics module normalizes the result by subtracting background signal intensity of the testing device (e.g., background plasma concentration, non-specific binding to the solid surface). Referring to external data, the data analytics module identifies whether external data indicates symptoms to an acute infection by a pathogen.

[0224] In some embodiments, the result is either positive or negative. In some embodiments, the positive result indicates an acute infection and negative result indicates a lack of an acute infection. In some embodiments, the positive result indicates that the subject is immune to a future infection by a pathogen of interest. In some embodiments, the data analytics module transmits the result to a communications module for display to the subject.

[0225] In some embodiments, the communication module is configured to display one or more results to the subject via a graphical user interface (GUI).

### Data Store

[0226] Disclosed herein, in some embodiments, are systems comprising one or more data stores. In some embodiments, the data store is a database suitable for the storage and retrieval of data. In various embodiments, suitable databases include, by way of non-limiting examples, relational databases, non-relational databases, object oriented databases, object databases, entity-relationship model databases, associative databases, and XML databases. Further non-limiting examples include SQL, PostgreSQL, MySQL, Oracle, DB2, and Sybase. In some embodiments, a database is internet-based. In further embodiments, a database is web-based. In still further embodiments, a database is cloud computing-based. In a particular embodiment, a database is a distributed database. In other embodiments, a database is based on one or more local computer storage devices, such as a smartphone.

### Graphical User Interface

[0227] Also disclosed herein, in some embodiments, are graphical user interfaces (GUI) configured to display a result to a user. In some embodiments, the user is the subject. In some embodiments, the GUI comprises one or more dashboards of an application (e.g., web application or mobile application). In some embodiments, the dashboard comprises relevant health information to a subject. In some embodiments, the GUI is a part of personal electronic device, such as a smartphone or tablet, belonging to the user.

### Web Portal

[0228] Disclosed herein, in some embodiments, is a web portal providing a single access point for multiple users to access information about the immune status of a subject. In some embodiments, a web portal provides access to a subject, a subject's doctor, or a healthcare worker responding to an urgent public health crisis. In some embodiments, the portal provides a single access point for a population of individuals, wherein the data is anonymized. In this example, the web portal provides access to policy makers, health care professionals, governmental organization, and non-governmental organizations responding to a public health crisis. Among other information, the portal can indicate one or more geographical locations comprising subjects that are either acutely infected by a pathogen of interest, or immune to the pathogen of interest.

### Methods

[0229] Disclosed herein, in some embodiments, are methods of measuring a target analyte disclosed herein in biological sample obtained from subject. In some embodiments, a subject may be a member of a variety of races. For example, the subject may be of the White, Black, Hispanic, or Asian race. In some embodiments, a subject may be of a variety of ages. For example, the subject may be age 0 to age 18, age 18 to age 65, or age 65 and above. In some embodiments, a subject may be a male or a female. In some embodiments, a subject may be pregnant, breastfeeding, or may have priorly been infected with a coronavirus. In some embodiments, a subject may be a high risk subject and have one or more risk factors related to a coronavirus. In some embodiments, a subject may be obese. In some embodiments, methods comprise utilizing the testing devices described herein. In some embodiments, methods further comprise analyzing data generated by the testing device disclosed herein, and providing a result to a user of an electronic device. In some embodiments, providing the result comprises displaying the result on a GUI of the electronic device. In some embodiments, the analyzing and displaying is performed by a single computing device (e.g., smartphone, tablet). In some embodiments, analyzing and displaying is performed at the point of need (e.g., at the time and space that the analyte is detected in the biological sample using the testing device described herein).

[0230] Provided herein are methods of processing a biological sample comprising: (a) providing a biological sample from a subject; (b) measuring a presence, an absence, or a level of a labeled complex between (i) a capture molecule and (ii) a peptide-conjugate comprising a peptide derived from a pathogen in the presence of the biological sample; (c) classifying the biological sample as having a presence or a level of the neutralizing antibody.

[0231] In some embodiments, methods further comprise determining whether a subject suffers from an acute infection by the pathogen (e.g., SARS-CoV-2). In some embodiments, methods further comprise determining whether the subject is immune to an infection by the pathogen (e.g., SARS-CoV-2). In some embodiments, methods further comprise determining whether a vaccine administered to the subject is effective to immunize the subject against the pathogen. In some embodiments, the methods further comprise determining whether the biological sample is safe for transfusion into another subject (e.g., blood, or blood plasma transfusion). In some embodiments, the methods further comprise determining whether the biological sample is safe as a convalescent plasma therapy for the prevention of an infection by the pathogen or treatment of a disease or condition associated with the pathogen. In some embodiments, the methods further comprise identifying the subject as having an acute infection by the pathogen of interest. In some embodiments, the methods further comprise identifying a subject in need of a vaccination to the pathogen of interest. The methods described herein may be performed at the point of care or point of need.

[0232] In some embodiments, the methods provided herein confirm presence, absence, or quantity of the neutralizing antibody described herein from a subject's biological sample. In some instances, the methods described herein prognose a subject's immunity to any one of the pathogens described herein. In some embodiments, the methods described herein prognose a subject's immunity to coronavirus. In some embodiments, the methods described herein prognose a subject's immunity to SARS-CoV-2. In some embodiments, the methods provided herein measure the subject's susceptibility to an infection by any one of the pathogens described herein. In some embodiments, the methods provided herein measure the subject's susceptibility to an infection by coronavirus. In some embodiments, the methods provided herein measure the subject's susceptibility to an infection by SARS-CoV-2. In some embodiments, the methods provided herein identify individuals in a population that respond to a vaccine and individuals in a population that do not respond to a vaccine. In some embodiments, the methods provided herein minimize or reduce the risk associated with usage of a commercialized vaccine in a population (e.g., by identifying individuals that do not respond to the vaccine). In some embodiments, the methods provided herein identify neutralizing antibodies as a surrogate marker of protection from a vaccine. In some embodiments, the methods provided herein classify vaccines by % efficacy in a population.

[0233] In some embodiments, the methods provided herein have an accuracy of at least 80%, for example, at least 85%, at least 86%, at least 87%, at least 88%, at least 89%, at least 90%, at least 91%, at least 92%, at least 93%, at least 94%, at least 95%, at least 96%, at least 97%, at least 98%, at least 99%, or greater. In some embodiments, the methods provided herein have a sensitivity of at least 80%, for example, at least 85%, at least 86%, at least 87%, at least 88%, at least 89%, at least 90%, at least 91%, at least 92%, at least 93%, at least 94%, at least 95%, at least 96%, at least 97%, at least 98%, at least 99%, or greater. In some embodiments, the methods provided herein have a specificity of at least 80%, for example, at least 85%, at least 86%, at least 87%, at least 88%, at least 89%, at least 90%, at least 91%, at least 92%, at least 93%, at least 94%, at least 95%, at least 96%, at least 97%, at least 98%, at least 99%, or greater.

[0234] In some embodiments, the pathogen is a virus, a bacterium, a fungus, or a parasite. In some embodiments, the virus is a DNA virus or an RNA virus. In some embodiments, the virus is a single stranded virus, or a double stranded virus. In some embodiments, the virus is a plus strand or a minus strand DNA or RNA virus. In some embodiments, the virus replicates through reverse transcription of an RNA intermediate. In some embodiments, the virus is a coronavirus. In some embodiments, the coronavirus is a severe acute respiratory syndrome coronavirus (SARS-CoV). In some embodiments, the SARS-CoV is SARS-CoV-2. In some embodiments, the coronavirus is Middle East Respiratory Syndrome coronavirus (MERS-CoV). In some embodiments, the coronavirus is an alpha coronavirus (e.g., 229E, NL63). In some embodiments, the coronavirus is a beta coronavirus (e.g., OC43, HKU1).

[0235] In some embodiments, the coronavirus comprises a protein having an amino acid sequence with greater than or equal to about 70%, 75%, 80%, 85%, 86%, 87%, 88%, 89%, 90%, 91%, 92%, 93%, 94%, 95%, 96%, 97%, 98%, 99%, or 100% sequence identity to one or more sequences, or portions thereof, provided in SEQ ID NOS: 1-116. In some embodiments, the pathogen of interest is a variant of the pathogen, for example, a pathogen that has evolved through mutations in the genes encoding the pathogen. In the case of a virus, the variant virus may have a mutation in an amino acid sequence of a viral protein, such as an envelope protein, nucleocapsid protein, membrane protein, hemagglutinin, neuraminidase, or spike protein. In some embodiments, the virus (e.g., coronavirus) comprises a mutation in one or more of the sequences provided in SEQ ID NOS: 1-116. In some embodiments, the mutation does not affect, or minimally affects, host receptor binding by the spike protein of the coronavirus. In some embodiments, the mutation is an insertion, a deletion, or a substitution at an amino acid (or a plurality of amino acids) of one or more sequences provided in SEQ ID NOS: 1-116.

[0236] In some embodiments, the human is an animal, such as a mammal. In some embodiment, the mammal is a dog, cat, monkey, non-human primate, rodent, or a farm animal. In some embodiments, the rodent is a gerbil, hamster, chinchilla, rat, mouse, or guinea pig. In some embodiments, the farm animal is a horse, a pig, a cow, a sheep, an alpaca, or a lama. In some embodiments, the mammal is a human subject. In some embodiments, the subject is pediatric (e.g., age 0-18). In some embodiments, the subject is not pediatric. In some embodiments, the subject is age 50 or older. In some embodiments, the subject is an age between 50-100, 55-95, 60-90, 65-85, or 70-80. In some embodiments, the subject is female or male. In some embodiments, the subject has been exposed to the pathogen. In some embodiments, the subject has not been exposed to the pathogen. In some embodiments, the subject exhibits one or more symptoms comprising a cough, fever, tiredness, or difficulty breathing. In some embodiments, the subject has an underlying health problem comprising high blood pressure, a heart problem, diabetes, immunodeficiency, autoimmune disease. In some embodiments, the subject is immunocompromised.

[0237] Described herein are methods for testing a population using the testing device or systems described herein. In some embodiments, the population comprises subjects of any demographics, age, or geographical locations. In some embodiments, all subjects in the population are vaccinated against the pathogen. In some embodiments, some subjects in the population are vaccinated against the pathogen. In some embodiments, none of the subjects in the population are vaccinated against the pathogen. In some embodiments, the number of vaccinated subjects in the population is unknown. In some embodiments, all subjects in the population are previously infected by the pathogen. In some embodiments, some subjects in the population are previously infected by the pathogen. In some embodiments, none of the subjects in the population are previously infected by the pathogen. In some embodiments, the number of subjects previously infected by the pathogen is unknown. In some embodiments, all subjects in the population are currently infected by the pathogen. In some embodiments, some subjects in the population are currently infected by the pathogen. In some embodiments, none of the subjects in the population are currently infected by the pathogen. In some embodiments, the number of subjects currently infected by the pathogen is unknown. In some embodiments, the population is a general population. In some embodiments, the population is a population undergoing clinical trial, where all subjects of the population are vaccinated or unvaccinated. In some embodiments, the population is a population that is at higher risk of the infection. For example, the population that is at higher risk of the infection includes healthcare workers, essential workers, elderly, subjects with pre-existing condition, subjects with respiratory disease or disorder, or subjects with comorbidity or any of the health problems described herein. In some embodiments, the population comprises individuals who are vaccine responders (e.g., develop neutralizing antibodies as described herein in response to the vaccine). In some embodiments, the population comprises individuals who are vaccine non-responders (e.g., do not develop neutralizing antibodies as described herein in response to the vaccine). In some embodiments, the population comprises individuals who have been infected and/or exposed to the natural pathogen.

[0238] In some embodiments, obtaining the biological sample from the subject or population of subjects is direct or indirect. Indirectly obtaining a biological sample from a subject may include receiving it from a laboratory or processing/storage facility by mail, or otherwise. In some embodiments, indirectly obtaining the biological sample from the subject or the population comprises the use of blood collection means such as blood card. In some embodiments, the blood card comprises multiple slots for collecting multiple samples of blood droplets for multiple testing. For example, a biological sample medium (BSM) (e.g., a dried blood spot card) comprises multiple slots is tested by the automated centralizing assay system performing assays such as control assay to verify the quality of the biological sample comprising the blood, lateral flow assay, ELISA, biomarker panel, qPCR, western blotting, and a neutralizing antibody titer assay. Non-limiting examples of biological samples include cell, tissue, or bodily fluid obtained from the subject. Non-limiting examples of biological samples include aqueous humour, vitreous humour, bile, breast milk, cerebrospinal fluid, endolymph, perilymph, female ejaculate, amniotic fluid, gastric juice, menses, mucus, peritoneal fluid, pleural fluid, saliva, sebum, semen, sweat, tears, vaginal secretion, vomit, urine, feces, whole blood, blood serum, blood plasma, sputum, cerebrospinal fluid, synovial fluid, lymphatic fluid, nasal swab, or cheek swab. In some embodiments, the biological sample comprises blood, urine, saliva, or feces. In some embodiments, the blood is capillary blood. In some embodiments, the blood is not venous blood (e.g., from a phlebotomy). In some instances, methods disclosed herein comprise obtaining a blood sample by administering a finger prick. In some embodiments, the biological sample is a swab sample (e.g., buccal swab, nasopharyngeal swab). Directly obtaining the biological sample from the subject, in some embodiments, is performed by a healthcare professional (e.g., nurse or doctor), laboratory technician, or the subject at the point of need or the point of care.

[0239] In some embodiment, the target analyte comprises macromolecules such as peptides, proteins, nucleic acids, pathogens, or pathogen particles that can be detected for presence or quantity (i.e. concentration) in a biological sample. In some embodiments, the target analyte is targeted and formed complex with an antigen or with an antibody. In some embodiments, the target analyte comprises an antibody against a pathogen. In some embodiments, the antibody against the pathogen is an antibody against an antigenic peptide derived from the pathogen. In some cases, the antibody is neutralizing antibody induced by an infection. In some instances, the antibody is neutralizing antibody induced by vaccination. As a non-limiting example, the analyte may be an antibody against a portion of the spike protein derived from a coronavirus (e.g., SARS-CoV-2). In some embodiments, the analyte is the activity of the antibody. In some embodiments, the activity is blocking binding between the spike protein of a coronavirus and its cognate receptor (e.g., ACE2). In some embodiments, the analyte is a complex comprising the spike protein bound to the antibody at the receptor binding region of the spike protein. In some embodiments, the antibody belongs to an immunoglobulin class comprising immunoglobulin M, immunoglobulin G, immunoglobulin A, immunoglobulin E, or immunoglobulin D.

[0240] In some embodiments, the detectable peptide-conjugate is the peptide-conjugate described herein comprising a detection agent and a peptide. In some embodiments, the peptide is an antigenic peptide. In some embodiments, the analyte (e.g., antibody) is specific to at least a portion of the peptide. In some embodiments, the peptide comprises at last a portion of the spike glycoprotein of a coronavirus (e.g., SARS-CoV-2) described herein. In some embodiments, the peptide is a receptor to the antigenic peptide. In some embodiments, the receptor comprises ACE2 receptor described herein.

[0241] In some embodiments, measuring comprises performing an assay on the biological sample to detect a number of complexes formed between the analyte and the peptide-conjugate, or the peptide-conjugate and the capture molecule, or both. In some embodiments, the assay comprises an assay assembly described herein. In some embodiments, the assay is a lateral flow assay. In some embodiments, the lateral flow assay is a competition assay. In some embodiments, measuring a number of complexes formed between the analyte and the peptide-conjugate, or the peptide-conjugate and the capture molecule, or both can be performed in one step without the need for washing any portion of the assay assembly.

[0242] In some embodiments, the index or the control is derived from a subject that has not been exposed to the pathogen (negative control). In some embodiments, the index or control is from a subject that has been exposed to the pathogen (positive control). In some embodiments, the index or control is obtained from a convalescent plasma donor. In some embodiments, the index or control is synthetically derived. In a non-limiting example of a control that is synthetically derived, the control can be sample with cells engineered to express a peptide or protein that is known to induce production of neutralizing antibodies against the pathogen to a known degree. In some embodiments, the control or index is a maximum absolute dilution of a reference sample in which neutralizing activity is observed in the reference sample. The higher the dilution, the stronger the neutralizing activity. In a non-limiting example, the dilution of 1:160 may be considered sufficient neutralizing activity and anything above 1:160 is considered to be high neutralizing activity. In another example, the dilution of 1:40 may be considered to be low or weak neutralizing activity. In this example, neutralizing activity in the diluted reference sample is a correlate of the level of neutralizing antibodies titers in the reference sample.

[0243] In some embodiments, if the level of neutralizing antibodies detected in the biological sample using the testing devices, systems and methods described herein correlates with a dilution that is above a threshold dilution (the control), then the biological sample is classified as having a sufficient presence or level of neutralizing antibodies to confer adaptive immunity against a pathogen. In some embodiments, the biological sample is classified as having a sufficient presence or high level of neutralizing antibodies when the level of neutralizing antibodies correlates with a dilution that is above 1:60, or above or equal to about 1:65, 1:70, 1:75, 1:80, 1:85, 1:90, 1:95, 1:100, 1:100, 1:105, 1:110, 1:115, 1:120, 1:125, 1:130, 1:135, 1:140, 1:145, 1:150, 1:155, 1:160, 1:165, 1:170, 1:175, 1:180, 1:185, 1:190, 1:195, 1:200, 1:205, 1:210, 1:215, 1:220, 1:225, 1:230, 1:235, 1:240, 1:245, 1:250, 1:255, 1:260, 1:265, 1:270, 1:275, 1:280, 1:285, 1:290, 1:295, 1:300, 1:305, 1:310, 1:315, 1:320, 1:325, 1:330, 1:335, 1:340, 1:345, 1:350, 1:355, 1:360, 1:365, 1:370, :375, 1:380, 1:385, 1:390, 1:395, 1:400, 1:405, 1:410, 1:415, 1:420, 1:425, 1:430, 1:435, 1:440, 1:445, 1:450, 1:455, 1:460, 1:465, 1:470, 1:475, 1:480, 1:485, 1:490, 1:495, 1:500, 1:505, 1:510, 1:515, 1:520, 1:525, 1:530, 1:535, 1:540, 1:545, 1:550, 1:555, 1:560, 1:565, 1:570, 1:575, 1:580, 1:585, 1:590, 1:595, 1:600, 1:605, 1:610, 1:615, 1:620, 1:625, 1:630, 1:635, or 1:640. In some embodiments, the dilution comprises four (4) dilutions equal to about 1:80, 1:160, 1:320, and 1:640.

[0244] Conversely, if the level of neutralizing antibodies detected in the biological sample correlates with a dilution that is below a threshold dilution, then the biological sample is classified as having a low level or insufficient presence of neutralizing antibodies to confer adaptive immunity. In some embodiments, the biological sample is classified as having an insufficient presence or a low level of neutralizing antibodies when the level of the neutralizing antibodies correlates with a dilution that is below or equal to about 1:5, 1:10, 1:15, 1:20, 1:25, 1:30, 1:35, 1:40, 1:45, 1:50, 1:55, or 1:60.

[0245] Methods described herein, in some embodiments, do not consist of utilizing a cell culture, such as an immortalized cell line expressing human ACE2. In some embodiments, methods do not consist of handling or administering to a cell or cell line a purified or isolated pathogen, such as a live virus of pseudovirus.

[0246] In some embodiments, the methods comprise measuring the target analyte in a biological sample from a subject or in a population of subjects multiple times. In some embodiments, the analyte is measured at least once every 12 hours, 24 hours, 36 hours, two days, three days, four days, five days, six days, one week, two weeks, three weeks, one month, two months, three months, four months, five months, six months, seven months, eight months, nine months, ten months, 11 months, one year, 18 months, two years, three years, four years, five years, six years, seven years, eight years, nine years, decade, or a combination thereof. In some embodiments, the analyte is measured at least 1, 2, 3, 4, 5, 6, 7, 8, 9, 10, 11, 12, 13, 14, 15, 16, 17, 18, 19, 20 or more times. In some embodiments, the analyte is measured at least 1, 2, 3, 4, 5, 6, 7, 8, 9, 10, 11, or 12 months following an event. In some embodiments, the event is an exposure to the pathogen, a first symptom of a disease or condition caused by the pathogen, a first dose of a vaccine against the pathogen, or a first dose of an anti-viral therapy to treat an acute infection by the pathogen. In some embodiments, the analyte is measured at least 1, 2, 3, 4, 5, 6, 7, 8, 9, or 10 years following the event. In some embodiments, the analyte is measured before the event, such as, for example before a first exposure to the pathogen to identify a subject or population of subjects who do not have sufficient immunity against the pathogen and who may be in need of a vaccine.

### Convalescent Plasma Therapy

[0247] The use of convalescent plasma for therapy to prevent SARS-CoV-2 infection requires demonstration that the plasma contains sufficient titers of neutralizing antibodies to confer immunity to SARS-CoV-2. Existing methods of detecting sufficient neutralizing antibody titers for this purpose are limited at the point of need because they require use of an immortalized cell line expressing human angiotensin converting enzyme II (ACE2), e.g., 293T cells. By contrast, the testing devices described herein are portable and methods of using the testing devices described herein are cell-free (e.g., do not require use of a cell or cell line). In this manner, the testing devices are more cost effective, do not require a laboratory technician, and is scaled quickly to meet the growing demand of individuals in need of convalescent plasma therapeutic interventions.

[0248] Disclosed herein, in some embodiments are methods of screening a biological sample for use as a convalescent plasma therapy, the method comprising: (a) providing a biological sample from a donor subject; (b) measuring a presence, an absence, or a level of a labeled complex between at least two of (i) a capture molecule, (ii) a peptide-conjugate comprising a peptide derived from a pathogen, and (ii) a neutralizing antibody against the pathogen; (c) classifying the biological sample as having a presence or a level of the neutralizing antibody; and (d) identifying the biological sample as safe or not safe as a convalescent therapy based at least in part on the classifying in (c). In some embodiments, the level is high relative to an index or a control. In some embodiments, the biological sample is identified as safe for convalescent therapy provided the presence or the level of the labeled complex between the peptide-conjugate and the neutralizing antibody against the pathogen is measured. In some embodiments, the biological sample is identified as unsafe for convalescent therapy provided the presence or the level of the labeled complex between the peptide-conjugate and the capture molecule is measured.

### Detecting Serological Antibodies and Neutralizing Antibodies

[0249] Disclosed herein, in some embodiments, are combined methods of identifying adaptive immunity to a pathogen in a subject and identifying the total antibodies against the pathogen that the subject is producing due to a past exposure. In some embodiments, the method comprises: (a) providing a biological sample from a subject in need thereof; (b) measuring a presence, or a level of a labeled complex between at least two of (i) a capture molecule, (ii) a peptide-conjugate comprising a peptide derived from a pathogen, and (iii) a neutralizing antibody against the pathogen; (c) measuring a presence, an absence or a level of an antibody against the pathogen (e.g., neutralizing or otherwise); (d) classifying the biological sample as having a presence or a level of the neutralizing antibody and/or a presence or a level of a type of antibody (e.g., IgG, IgM, IgA) against the pathogen; and (d) identifying the subject as having sufficient adaptive immunity against the pathogen, based at least in part, on classifying in (c); and/or (e) identifying the subject as having been exposed to the pathogen prior based on classifying in (d). In some embodiments, if the number of the labeled complexes between (ii) and (iii) is high relative to an index or a control, then the subject has a sufficient adaptive immunity to an infection by the pathogen. In some embodiments, if the number of the complexes between (i) and (ii) is high relative to an index or a control, then the subject has a sufficient adaptive immunity to the infection by the pathogen. In some embodiments, the methods described herein are performed using the testing device of the present disclosure. In some embodiments, measuring a presence, an absence or a level of an antibody against the pathogen (e.g., neutralizing or otherwise) can be performed in one step without the need for washing any portion of the testing device. In some embodiments, the capture molecule or peptide-conjugate may comprise a peptide or protein that is encoded by a nucleic acid sequence, or that has an amino acid sequence, that is at least 80% identical to any one of SEQ ID NOS: 21-23, 25-42, 44-46, 49-66, 68-70, 73-90, 92-94, or 97-114.

[0250] The presence, absence, or the level of the antibody against the pathogen may be measured by detecting a complex between the antibody (e.g., IgG, IgM, IgA) and a capture molecule that is directly or indirectly labeled. In some embodiments, a level of the antibody that is high, relative to an index or a control is indicative that the subject was exposed to the pathogen. In contrast, if the level of the antibody is low relative to the index or control, the subject was not exposed to the pathogen.

[0251] In some embodiments, a presence, absence or a level of a biomarker is measured in the biological sample. In some embodiments, the biomarker is a marker of inflammation, such as a cytokine (e.g., interleukin 6). In some embodiments, the presence, absence or level of multiple biomarkers is measured in addition to the total antibodies and neutralizing antibodies against the pathogen. In some embodiments, the pathogen is SARS-CoV-2, or a variant thereof.

### Neutralizing Antibody (Neutralization) Titer

[0252] Described, in some embodiments, are methods for measuring neutralizing antibody titer for determining sufficient quantity of neutralizing antibody to confer adaptive immunity against any one of the pathogens described herein. In some embodiments, a biological sample of neutralizing antibody to be tested is serial-diluted and mixed with a viral suspension. The mixture is applied to known number of cells for inoculation. In some embodiments, the neutralizing antibody titer is determined by calculating the highest dilution of biological sample of neutralizing antibody that prevents infection of at least 30%, 40%, 50%, 60%, 70%, 80%, 90%, 95%, 99% or more of replicate inoculations. In some embodiments, the neutralization titer is determined by calculating the highest dilution of the biological sample of neutralizing antibody that prevents infection at 50% of replicate inoculation. In some cases, the method of measuring neutralization titer comprises the use of viral plaque assay, fluorescent focus assay, and endpoint dilution assay. Each of these three assays relies on serial viral dilutions added to cells to measure neutralization titer. Other exemplary measurements for determining neutralization titer include qPCR or ELISA for quantifying the amount of pathogen genome or particle necessary to infect a set number of cells in the presence of the neutralizing antibody. In some embodiments, the quantity of neutralizing antibody detected in a biological sample is sufficient in inducing adaptive immunity when the concentration of the neutralizing antibody in the biological sample prevents infection at 50% of replicate inoculation. In some embodiments, the quantity of neutralizing antibody detected in a biological sample is insufficient in inducing adaptive immunity when the concentration of the neutralizing antibody in the biological sample prevents infection below 50% of replicate inoculation.

### Population Screening

[0253] Described herein, in some embodiments, are methods utilizing the systems, devices, and compositions described herein for screening a population described herein for prognosing immunity or susceptibility to infection caused by any one of the pathogen described herein. In some embodiments, the method comprises detecting presence, absence, or quantity of analyte comprising the neutralizing antibody in the population. In some embodiments, the method prognoses immunity or susceptibility to the infection based on the presence, absence, or quantity of the neutralizing antibody in the biological samples obtained from the subjects in the population. In some embodiments, the method prognoses the population to have adaptive immunity against the infection when the presence or sufficient quantity of the neutralizing antibody is detected in the biological samples. In some embodiments, the method prognoses the subject to have susceptibility or inadequate immunity to the infection when the neutralizing antibody is absent or is detected at an insufficient quantity in biological samples. In some embodiments, the method identifies the subjects with absence or insufficient quantity of neutralizing antibody as subjects who are in need of vaccination. In some embodiments, the population is screened at any one of the time frames or frequencies described herein.

[0254] In some embodiments, the method determines if the population is in need of vaccination against the infection based on the presence, absence, or quantity of the neutralizing antibody in the biological samples. In some embodiments, the method determines that the population does not need to be vaccinated due to presence or sufficient quantity of the neutralizing antibody detected in the biological samples. In some embodiments, the method determines that the population does not need to be vaccinated due to herd immunity when the percentage of the subjects of the population with presence or sufficient quantity neutralizing antibody is at least 30%, 40%, 50%, 60%, 70%, 80%, 90%, 95%, or 99%. In some embodiments, the method determines that the population or subjects within the population need to be vaccinated due to absence or insufficient quantity of the neutralizing antibody detected in the biological samples.

### Confirmatory Diagnostic for a Vaccine

[0255] Described herein, in some embodiments, are confirmatory diagnostic testing devices and methods of their use to determine the efficacy or effectiveness of a vaccine against a pathogen described herein. In some embodiments, methods of determining the efficacy or effectiveness of a vaccine described herein comprise detecting presence, absence, or quantity of neutralizing antibody against the pathogen in a biological sample from a subject that was administered the vaccine.

[0256] Disclosed herein, in some embodiments are methods of determining the efficacy or effectiveness of a vaccine against a pathogen, the method comprising: (a) providing a biological sample from a subject in need thereof; (b) measuring a presence, an absence, or a level of a labeled complex between at least two of (i) a capture molecule, (ii) a peptide-conjugate comprising a peptide derived from a pathogen, and (iii) a neutralizing antibody against the pathogen; (c) classifying the biological sample as having a presence or a level of the neutralizing antibody; and (d) identifying the vaccine as effective to induce a sufficient or insufficient adaptive immune response against the pathogen in the subject. In some embodiments, the level is high relative to an index or a control. In some embodiments, the vaccine is effective, provided the presence or the level of the labeled complex between the peptide-conjugate and the neutralizing antibody against the pathogen is measured. In some embodiments, the vaccine is not effective, provided the presence or the level of the labeled complex between the peptide-conjugate and the capture molecule is measured. In some embodiments, methods further comprise measuring a presence, absence or a level of a biomarker described herein. In some embodiments, the biomarker is interleukin 6. In some embodiments, measuring a presence, an absence, or a level of a labeled complex between at least two of (i) a capture molecule, (ii) a peptide-conjugate comprising a peptide derived from a pathogen, and (iii) a neutralizing antibody against the pathogen can be performed in one step without the need for washing.

[0257] In some embodiments, methods confirm that the vaccine lacks efficacy or effectiveness in the subject, provided an absence of the neutralizing antibody is detected in the biological sample obtained from the subject that was administered the vaccine. In some embodiments, methods confirm that the vaccine lacks efficacy or effectiveness, provided the level of the neutralizing antibody detected is low relative to an index or a control level. An absence or a low level of the neutralizing antibody is identified when a presence of the labeled complex between the peptide-conjugate and the capture molecule is detected. In some embodiments, methods confirm that the vaccine is effective, provided a presence of the neutralizing antibody is detected in the biological sample obtained from the subject that was administered the vaccine. In some embodiments, methods confirm that the vaccine is effective provided a level of the neutralizing antibody that is detected is high relative to an index or a control level.

[0258] In some embodiments, the subject is part of a general population, where not everyone in the general population was or is administered the vaccine. In some embodiments, the testing devices and methods described herein confirm which subjects of the general population are in need of the vaccine by detecting the absence or the low level of the neutralizing antibody in biological samples obtained from the subjects.

[0259] In some embodiments, the testing devices and methods described herein measure neutralizing antibodies against a pathogen in a biological sample from a subject prior to enrolling the subject in the clinical trial. In some embodiments, the presence or level of the neutralizing antibody detected in the biological sample excludes the subject from participating in the clinical trial for the vaccine. The absence or level of the neutralizing antibody detected in the biological sample is an inclusion criteria for the subject to enroll in the clinical trial for the vaccine. In some embodiments, the testing devices and methods described herein measure neutralizing antibodies against a pathogen in a biological sample from a subject during the clinical trial for the investigation of the efficacy of the vaccine. In some embodiments, a biological sample from the vaccinated subject is tested using the testing devices and methods described herein when an adverse event is observed during the clinical trial. In some embodiments, the adverse event is correlated with a presence, absence or level of neutralizing antibodies in the biological sample.

[0260] In some embodiments, the testing devices and methods described herein confirm efficacy or effectiveness of the vaccine in a population of subjects. In some embodiments, the population being tested for efficacy or effectiveness of the vaccine is a group receiving the vaccine (as opposed to a different group receiving the placebo) in a clinical trial. In some embodiments, the population being tested for efficacy or effectiveness of the vaccine is a group that is outside the clinical trial context, such as after the vaccine is allowed or approved for use in preventing a disease caused by the pathogen. In some embodiments, the testing devices and methods described herein detect presence, absence, or quantity of the neutralizing antibody against a pathogen in a biological sample from each subject in the group before and after the group is administered the vaccine. In some embodiments, the testing devices and methods described herein confirm adaptive immunity in the vaccinated population based on presence or high level of the detected neutralizing antibody in the biological samples obtained from the vaccinated subjects in the population. In some embodiments, the testing devices and methods described herein confirm a lack of sufficient adaptive immunity in the vaccinated population based on absence or low level of the detected neutralizing antibody in the biological samples obtained from the vaccinated subjects in the population. In this instance, a booster of the vaccine may be recommended for at least one subject of the group, or the entire group.

[0261] In some embodiments, neutralizing antibodies induced by the vaccine are measured multiple times after administration of the vaccine to determine whether the vaccine is effective to confer immunity against the pathogen (e.g., SARS-CoV-2). In some embodiments, the neutralizing antibodies are measured after administration of the vaccine at least once every 12 hours, 24 hours, 36 hours, two days, three days, four days, five days, six days, one week, two weeks, three weeks, one month, two months, three months, four months, five months, six months, seven months, eight months, nine months, ten months, 11 months, one year, per 18 months, two years, three years, four years, five years, six years, seven years, eight years, nine years, 10 years, or a combination thereof. In some embodiments, the neutralizing antibodies are measured at least 1, 2, 3, 4, 5, 6, 7, 8, 9, 10, 11, 12, 13, 14, 15, 16, 17, 18, 19, 20 or more times. In some embodiments, the neutralizing antibodies are measured at least 1, 2, 3, 4, 5, 6, 7, 8, 9, 10, 11, or 12 months following administration of the vaccine to the subject. In some embodiments, the neutralizing antibodies are measured at least 1, 2, 3, 4, 5, 6, 7, 8, 9, or 10 years following administration of the vaccine to the subject.

### Identifying Vaccine Responders and Non-Responders

[0262] In some embodiments, methods are provided using the systems, devices, and compositions described herein for identifying those subjects that respond to a vaccine (e.g., responders) and those subjects that do not respond to a vaccine (e.g., non-responders). In some embodiments, the systems, devices, and compositions described herein may be used to test individuals in a population of individuals for the presence or absence of neutralizing antibodies to identify those individuals that responded to the vaccine (e.g., produced neutralizing antibodies), and those individuals that did not respond to the vaccine (e.g., did not produce neutralizing antibodies). The population may be a group of individuals that received a vaccine against the pathogen (e.g., SARS-CoV-2). The population may be a group of individuals that received a vaccine during a clinical trial to assess vaccine efficacy. The population may be a group of individuals that received a vaccine as part of a large-scale, mass vaccination campaign. In some embodiments, the methods provided herein assess an individual's particularized response to a vaccine. The methods provided herein identify those individuals that did not respond to a particular vaccine, inform those individuals that they did not develop immunity to the pathogen, and inform those individuals that they should seek alternative interventions (e.g., alternative vaccines) and/or start or continue safety precautions (e.g., social distancing, the use of PPE, etc.).

[0263] In some embodiments, the methods may involve administering a vaccine to a population of individuals, and testing each of those individuals for the presence or absence of neutralizing antibodies to assess whether the vaccine conferred immunity against the pathogen (e.g., SARS-CoV-2). The individuals, after receiving the vaccine, may submit one or more biological samples to be tested for the presence or absence of neutralizing antibodies as described herein (e.g., by submitting the sample to a centralized testing center). For example, each individual that receives a vaccine may be given a sample collection device (e.g., a blood spot card) for submitting a biological sample for testing. The sample collection device (e.g., blood spot card) may be given to the individual at the time of vaccination.

[0264] The individual may collect one or more biological samples (e.g., a finger prick to collect a blood sample) and provide the one or more biological samples in the sample collection device (e.g., blood card). This may be done before and after vaccine administration. For example, the one or more biological samples may be collected at a time point before the individual has been vaccinated to establish a baseline level of neutralizing antibodies. After administration of the vaccine, the one or more biological sample may be collected again in the same manner at least 1 week, at least 2 weeks, at least 3 weeks, at least 4 weeks, or at least 2 months after vaccine administration to determine whether the vaccine induced a sufficient neutralizing antibody titer to confer protection against the pathogen. Generally, the one or more biological samples are taken after sufficient time has elapsed for the individual to develop neutralizing antibodies (e.g., if the individual responds to the vaccine). To assess the durability of the vaccine, one or more biological samples may be collected in the same manner at least 3 months, 4 months, 5 months, 6 months, 7 months, 8 months, 9 months, 10 months, 11 months, 12 months, 2 years, 3 years, 4 years, 5 years, or more following the vaccine administration.

[0265] The individual may submit the one or more biological samples in the sample collection device (e.g., blood spot card) to a testing center. The testing center may test the one or more biological samples for the presence or absence of neutralizing antibodies (e.g., using the systems, devices, and compositions described herein), and may identify the individual as either a vaccine responder (e.g., the individual developed neutralizing antibodies) or as a vaccine non-responder (e.g., the individual did not develop neutralizing antibodies). The testing center may provide the individual with a report (or may otherwise inform the individual) indicating the individual's status as a vaccine responder or as a vaccine non-responder. When the individual is identified as a vaccine responder, the individual may be understood to have developed immunity (e.g., the individual responded to the vaccine) to the pathogen (e.g., SARS-CoV-2).

[0266] When the individual is identified as a vaccine non-responder (e.g., the individual did not respond to the vaccine), the individual may be understood to not have developed immunity to the pathogen (e.g., SARS-CoV-2). Alternatively, if durability of an initial response weakens over time, the individual may be understood to no longer have sufficient immunity to the pathogen. In some embodiments, an alternative intervention (e.g., an alternative vaccine), may be recommended to the individual. In some embodiments, additional precautions may be recommended to the individual, such as social distancing, sheltering-in-place, quarantining, the use of personal protective equipment (e.g., gloves, face coverings), and the like. In some embodiments, the vaccine has entered the market. In some embodiments, the vaccine is a vaccine in development or a vaccine that has not yet been approved by a regulatory entity, such as the FDA. In some cases, the vaccine is a vaccine that has been licensed for use by the regulatory entity.

### Mitigating Risk During Vaccine Usage in a Population Following Market Entry

[0267] In some embodiments, methods are provided herein using the systems, devices, and compositions described herein to mitigate or reduce the risk associated with usage of a commercialized vaccine in a population. The methods provided herein may assess the benefit and the risk of a particular vaccine by identifying the individuals who respond to the vaccine and the individuals who do not respond to the vaccine. In some embodiments, the systems, devices, and compositions described herein may be used to test individuals in a population for the presence or absence of neutralizing antibodies to identify those individuals that responded to a particular vaccine (e.g., produced neutralizing antibodies), and those individuals that did not respond to the vaccine (e.g., did not produce neutralizing antibodies). In some embodiments, the non-responders are identified and informed that they did not develop immunity, thereby removing the risk associated with a particular vaccine. The methods provided herein allow a vaccine developer to leverage the benefits associated with a particular vaccine, including vaccines with limited efficacy, while minimizing or reducing the risks associated with the vaccine. The methods provided herein may be particularly suited for emergent situations in which multiple vaccines are being developed on an accelerated timeline against a pathogen (and may not be subject to the entire FDA review process).

[0268] As depicted in FIG. 11A, two vaccines targeting the same pathogen (e.g., SARS-CoV-2) have been developed and licensed for use. Each of the two vaccines may have different levels of efficacy in a population. For example, 70% of the individuals in a population may respond to vaccination with Vaccine 1 (e.g., the “benefit”), whereas 30% of the individuals in the population may not respond to vaccination with Vaccine 1 (e.g., the “risk”). Vaccine 1 may be deemed “efficacious” because the benefit outweighs the risk (e.g., the number of responders is greater than the number of non-responders). Although there are some individuals for which Vaccine 1 was not effective, Vaccine 1 is developed into a vaccine for widespread use against the pathogen (e.g., SARS-CoV-2). In contrast, 40% of the individuals in a population may respond to vaccination with Vaccine 2 (e.g., the “benefit”), and 60% of the individuals in the population may not respond to vaccination with Vaccine 2 (e.g., the “risk”). In this scenario, Vaccine 2 may be deemed “not efficacious” because the risk outweighs the benefit (e.g., the number of non-responders is greater than the number of responders). Despite having a benefit for a subset of the population, Vaccine 2 is not used to prevent infection in a population by the pathogen (e.g., SARS-CoV-2).

[0269] In some embodiments, the methods provided herein may be used to identify the risk of a particular vaccine and remove the risk (e.g., by informing the non-responders of their status). As depicted in FIG. 11B, the methods provided herein identify the risk of Vaccine 1 (e.g., the 30% of the population who did not respond to Vaccine 1) and those individuals are informed that they did not develop immunity to the pathogen (SARS-CoV-2). In this scenario, Vaccine 1 is still considered to be “efficacious” and is used. Similarly, the methods provided herein identify the risk of Vaccine 2 (e.g., the 60% of the population who did not respond to Vaccine 2) and those individuals are informed that they did not develop immunity to the pathogen (e.g., SARS-CoV-2). In this scenario, the risk is removed because the non-responders are informed that they do not have immunity to the pathogen (and can take precautionary measures such as social distancing, the use of PPE, and the like). In contrast to the scenario depicted in FIG. 11A, Vaccine 2 is now considered to be “efficacious” and used. Thus, the methods provided herein reduce or remove the risk (e.g., the population of non-responders) associated with a vaccine and increase the chances that a vaccine is used.

[0270] The individual may collect one or more biological samples (e.g., a finger prick to collect a blood sample) and provide the one or more biological samples in the sample collection device (e.g., blood card). This may be done before and after vaccine administration. For example, the one or more biological samples may be collected at a time point before the individual has been vaccinated to establish a baseline level of neutralizing antibodies. After administration of the vaccine, the one or more biological sample may be collected again in the same manner at least 1 week, at least 2 weeks, at least 3 weeks, at least 4 weeks, or at least 2 months after vaccine administration to determine whether the vaccine induced a sufficient neutralizing antibody titer to confer protection against the pathogen. Generally, the one or more biological samples are taken after sufficient time has elapsed for the individual to develop neutralizing antibodies (e.g., if the individual responds to the vaccine). To assess the durability of the vaccine, one or more biological samples may be collected in the same manner at least 3 months, 4 months, 5 months, 6 months, 7 months, 8 months, 9 months, 10 months, 11 months, 12 months, 2 years, 3 years, 4 years, 5 years, or more following the vaccine administration.

[0271] The individual may submit the one or more biological samples in the sample collection device (e.g., blood spot card) to a testing center. The testing center may test the one or more biological samples for the presence or absence of neutralizing antibodies (e.g., using the systems, devices, and compositions described herein), and may identify the individual as either a vaccine responder (e.g., the individual developed neutralizing antibodies) or as a vaccine non-responder (e.g., the individual did not develop neutralizing antibodies). The testing center may provide the individual with a report (or may otherwise inform the individual) indicating the individual's status as a vaccine responder or as a vaccine non-responder.

[0272] When the individual is identified as a vaccine responder, the individual may be understood to have developed immunity (e.g., the individual responded to the vaccine) to the pathogen (e.g., SARS-CoV-2). When the individual is identified as a vaccine non-responder (e.g., the individual did not respond to the vaccine), the individual may be understood to not have developed immunity to the pathogen (e.g., SARS-CoV-2). Alternatively, if the durability of the initial response weakens over time, the individual may be understood to no longer have sufficient immunity to the pathogen. In some embodiments, an alternative intervention, such as an alternative vaccine under development, may be recommended to the individual. In some embodiments, additional precautions may be recommended to the individual, such as social distancing, sheltering-in-place, quarantining, the use of personal protective equipment (e.g., gloves, face coverings), and the like. In some embodiments, the vaccine has entered the market for use. In some embodiments, the vaccine is a vaccine in development or a vaccine that has not yet been approved by a regulatory entity (e.g., the FDA). In some cases, the vaccine is a vaccine that has been licensed for use by the regulatory entity.

### Classifying Vaccines in a Population of Individuals

[0273] In some embodiments, methods are provided using the systems, devices, and compositions described herein to classify a vaccine in a population of individuals. In some embodiments, the methods comprise (a) providing a biological sample from each individual of a population of individuals; (b) measuring a presence, an absence, or a level of a labeled complex between at least two of (i) a capture molecule, (ii) a peptide-conjugate comprising a peptide derived from a pathogen, and (iii) a neutralizing antibody against the pathogen in the biological sample; (c) classifying each biological sample as having a presence, an absence, or a level of the neutralizing antibody; and (d) classifying the vaccine based on the presence or the level of the neutralizing antibodies measured in (b). In some embodiments, the vaccine is classified by % efficacy in the population (e.g., the % of individuals in a population that responded (e.g., developed neutralizing antibodies) to the vaccine). In some embodiments, the vaccine is at least 50% efficacious in a population (e.g., at least 60%, at least 70%, at least 80%, at least 90%, at least 95%, at least 97%, at least 98%, at least 99%). In some embodiments, the classification of the vaccine is specific to a particular population class, such as gender, age, and individuals with pre-existing conditions (e.g., immune-compromised). For example, the vaccine may be 50% efficacious in children ages 12 and younger, whereas the vaccine may be 75% efficacious in adults ages 65 and older. In some embodiments, measuring a presence, an absence, or a level of a labeled complex between at least two of (i) a capture molecule, (ii) a peptide-conjugate comprising a peptide derived from a pathogen, and (iii) a neutralizing antibody against the pathogen in the biological sample can be performed in one step without the need for washing.

### Measuring Neutralizing Antibodies as a Surrogate Marker of Protection

[0274] In some embodiments, methods are provided using the systems, devices, and compositions described herein to identify the presence and/or a high level of neutralizing antibodies in an individual after administration of a vaccine. In some embodiments, the methods utilize the presence and/or high level of neutralizing antibodies as a surrogate marker of protection in the individual. In some embodiments, the presence and/or high level of neutralizing antibodies in the individual is used to inform a vaccine developer that the individual developed immunity to the pathogen (e.g., SARS-CoV-2). In some embodiments, the presence and/or high level of neutralizing antibodies in the individual is used in place of traditional methods that test efficacy of a vaccine (e.g., a randomized, placebo-controlled clinical trial).

[0275] In some embodiments, the methods comprise (a) providing a biological sample from a subject having been administered a vaccine; (b) measuring a presence, an absence, or a level of a labeled complex between at least two of (i) a capture molecule, (ii) a peptide-conjugate comprising a peptide derived from a pathogen, and (iii) a neutralizing antibody against the pathogen; (c) classifying the biological sample as having a presence, an absence, or a level of the neutralizing antibody; and (d) identifying the subject as having immunity against the pathogen based on the presence and/or a high level of the neutralizing antibody.

### Vaccines

[0276] In some embodiments, the vaccine is for the active immunization for the prevention of disease caused by a pathogen. The pathogen described herein, in some embodiments, is any bacteria, virus, or fungus that causes infection in a mammal. In some embodiments, a pathogen is a virus of any one of the virus described herein. The virus is a DNA virus or an RNA virus. A DNA virus is a single-stranded (ss) DNA virus, a double-stranded (ds) DNA virus, or a DNA virus that contains both ss and ds DNA regions. An RNA virus is a single-stranded (ss) RNA virus or a double-stranded (ds) RNA virus. A ssRNA virus can further be classified into a positive-sense RNA virus or a negative-sense RNA virus.

[0277] In some embodiments, the dsDNA virus is from the family: Myoviridae, Podoviridae, Siphoviridae, Alloherpesviridae, Herpesviridae, Malacoherpesviridae, Lipothrixviridae, Rudiviridae, Adenoviridae, Ampullaviridae, Ascoviridae, Asfaviridae, Baculoviridae, Bicaudaviridae, Clavaviridae, Corticoviridae, Fuselloviridae, Globuloviridae, Guttaviridae, Hytrosaviridae, Iridoviridae, Marseilleviridae, Mimiviridae, Nimaviridae, Pandoraviridae, Papillomaviridae, Phycodnaviridae, Plasmaviridae, Polydnaviruses, Polyomaviridae, Poxviridae, Sphaerolipoviridae, and Tectiviridae. A ssDNA virus is from the family: Anelloviridae, Bacillariodnaviridae, Bidnaviridae, Circoviridae, Geminiviridae, Inoviridae, Microviridae, Nanoviridae, Parvoviridae, and Spiraviridae. A DNA virus that contains both ss and ds DNA regions is from the group of pleolipoviruses. In some cases, the pleolipoviruses include Haloarcula hispanica pleomorphic virus 1, Halogeometricum pleomorphic virus 1, Halorubrum pleomorphic virus 1, Halorubrum pleomorphic virus 2, Halorubrum pleomorphic virus 3, and Halorubrum pleomorphic virus 6.

[0278] In some embodiments, the dsRNA virus is from the family: Bimaviridae, Chrysoviridae, Cystoviridae, Endomaviridae, Hypoviridae, Megavimaviridae, Partitiviridae, Picobimaviridae, Reoviridae, Rotavirus and Totiviridae. A positive-sense ssRNA virus is from the family: Alphaflexiviridae, Alphatetraviridae, Alvemaviridae, Arteriviridae, Astroviridae, Bamaviridae, Betaflexiviridae, Bromoviridae, Caliciviridae, Carmotetraviridae, Closteroviridae, Coronaviridae, Dicistroviridae, Flaviviridae, Gammaflexiviridae, Iflaviridae, Leviviridae, Luteoviridae, Mamaviridae, Mesoniviridae, Namaviridae, Nodaviridae, Permutotetraviridae, Picomaviridae, Potyviridae, Roniviridae, Secoviridae, Togaviridae, Tombusviridae, Tymoviridae, and Virgaviridae. A negative-sense ssRNA virus is from the family: Bomaviridae, Filoviridae, Paramyxoviridae, Rhabdoviridae, Nyamiviridae, Arenaviridae, Bunyaviridae, Ophioviridae, and Orthomyxoviridae.

[0279] In some embodiments, the vaccine described herein confers adaptive immunity against the pathogen when administered to a subject. In some embodiments, the vaccine described herein confers adaptive immunity to a subject against pathogenic (e.g., viral) infection caused by the pathogen. In some embodiments, the vaccine described herein induces neutralizing antibody against the pathogen in the subject after administration of the vaccine.

[0280] In some embodiments, the vaccine confers adaptive immunity against a coronavirus. In some instances, the coronavirus is selected from the group consisting of: alphacoronavirus, betacoronavirus, deltacoronavirus, and gammacoronavirus. Examples of alphacoronavirus include, but are not limited to, Bat coronavirus CDPHE15, Bat coronavirus HKU10, Human coronavirus 229E, Human coronavirus NL63, Miniopterus bat coronavirus 1, Miniopterus bat coronavirus HKU8, Mink coronavirus 1, Porcine epidemic diarrhoea virus, Rhinolophus bat coronavirus HKU2, and Scotophilus bat coronavirus 512. Examples of betacoronavirus include, but are not limited to, Betacoronavirus 1, Hedgehog coronavirus 1, Human coronavirus HKU1, Middle East respiratory syndrome-related coronavirus, Murine coronavirus, Pipistrellus bat coronavirus HKU5, Rousettus bat coronavirus HKU9, Severe acute respiratory syndrome-related coronavirus, Tylonycteris bat coronavirus HKU4. Examples of deltacoronavirus include, but are not limited to, Bulbul coronavirus HKU11, Common moorhen coronavirus HKU21, Coronavirus HKU15, Munia coronavirus HKU13, Night heron coronavirus HKU19, Thrush coronavirus HKU12, White-eye coronavirus HKU16, Wigeon coronavirus HKU20. Examples of gammacoronavirus include, but are not limited to, Avian coronavirus, Beluga whale coronavirus SW1. Additional examples of coronavirus include MERS-CoV, SARS-CoV, and SARS-CoV-2.

[0281] In some embodiments, the vaccine comprises an inactivated virus of any one of the virus described herein. In some embodiments, the vaccine comprises an inactivated coronavirus. In some embodiments, the vaccine comprises an inactivated SARS-CoV-2. In some embodiments, the vaccine comprises formalin-inactivated SARS-CoV-2. In some cases, the vaccine comprises a live-attenuated virus of any one of the virus described herein. In some cases, the vaccine comprises a live-attenuated coronavirus. In some cases, the vaccine comprises a live-attenuated SARS-CoV-2.

[0282] In some embodiments, antigenic peptide is derived from a protein of any one of the pathogens described herein. In some embodiments, the antigen is viral antigen derived from a viral protein, a fragment of a viral protein, or a nucleic acid encoding the viral protein or the fragment of the viral protein. In some embodiments, the viral antigen is a viral antigen of coronavirus. In some embodiments, the viral antigen is a viral antigen of SARS-CoV-2.

[0283] In some embodiments, the vaccine comprises viral antigen for inducing adaptive immunity in a subject. In some embodiments, the viral antigen is a non-mutated antigen. In some embodiments, the viral antigen is derived from publicly disclosed information on the viral genetic information. In some embodiments, the viral antigen is derived from analysis of the viral genome to predict suitable epitopes for T cell activation. In some embodiments, the viral antigen is derived from analysis of the sequence of the viral genome in a MHC-peptide presentation prediction algorithm implemented in a computer processor. In some embodiments, the viral antigen is derived from analysis of the viral sequences in an MHC-peptide presentation prediction algorithm implemented in a computer processor that has been trained by a machine learning software, which predicts the likelihood of binding and presentation of an epitope by an MHC class I or an MHC class II antigen. In some embodiments, the MHC-peptide presentation predictor is neonmhc2.

[0284] In some embodiments, the viral antigen is encoded by a nucleic acid sequence that is at least 50%, 55%, 60%, 65%, 70%, 75%, 80%, 85%, 90%, 95%, 96%, 97%, 98%, or 99% identical to SEQ ID NOS: 7-10 (SARS-CoV-2), 13-16 (SARS-CoV NL630), 17-20 (SARS CoV Tor2). In some embodiments, the viral antigen is encoded by a nucleic acid sequence that is 100% identical to any one of SEQ ID NOS: 7-10, 13-16, or 17-20. In some instances, the viral antigen comprises a peptide sequence that is at least 50%, 55%, 60%, 65%, 70%, 75%, 80%, 85%, 90%, 95%, 96%, 97%, 98%, or 99% identical to any one of SEQ ID NOS: 2-6, or 11-12. In some instances, the viral antigen comprises a peptide sequence that is 100% identical to any one of SEQ ID NOS: 2-6, 11-12, 24, 47-48, 71-72, 95-96, or 115. In some instances, the viral antigen comprises a peptide sequence that is at least 50%, 55%, 60%, 65%, 70%, 75%, 80%, 85%, 90%, 95%, 96%, 97%, 98%, or 99% identical to a fragment of any one of SEQ ID NOS: 2-6, 11-12, 24, 47-48, 71-72, 95-96, or 115. In some instances, the viral antigen comprises a peptide sequence that is 100% identical to a fragment of SEQ ID NOS: 2-4, or 11-12.

TABLE 1
Amino Acid Sequence Mutations to SEQ ID NO: 5
Amino Acid Sequence Mutations

| | | |
|---|---|---|
| H69del | D1118H | P26S |
| V70del | L18F | D138Y |
| Y144del | D80A | R190S |
| N501Y | D215G | K417T |
| A570D | R246I | H655Y |
| D614G | K417N | T1027I |
| P681H | E484K | V1176F |
| T716I | A701V | |
| S982A | T20N | |

[0285] In some embodiments, the viral antigen comprises an amino acid sequence provided in SEQ ID NO: 5, or a variant thereof. In some embodiments, the viral antigen comprises 1, 2, 3, 4, 5, 6, 7, 8, 9, 10, 11, 12, 13, 14, 15, 16, 17, 18, 19, 20, 21, 22, 23, 24, or 25 or more of the mutations to SEQ ID NO: 5 listed in Table 1.

[0286] In some embodiments, the vaccine comprises a viral antigen of SARS-CoV-2. In some embodiments, the viral antigen is selected from the group consisting of: orf1a, orf1ab, Spike glycoprotein (S protein), 3a, 3b, Envelope protein (E protein), Membrane protein (M protein), p6, 7a, 7b, 8b, 9b, Nucleocapsid protein (N protein), orf14, nsp1 (leader protein), nsp2, nsp3, nsp4, nsp5 (3C-like proteinase), nsp6, nsp7, nsp8, nsp9, nsp10 (growth-factor-like protein), nsp12 (RNA-dependent RNA polymerase, or RdRp), nsp13 (RNA 5′-triphosphatase), nsp14 (3′-to-5′ exonuclease), nsp15 (endoRNAse), and nsp16 (2′-O-ribose methyltransferase). In some embodiments, the viral antigen induces formation of neutralizing antibody against the viral antigen in a subject after administration of the vaccine.

[0287] In some embodiments, the viral antigen comprises Spike glycoprotein (S protein) or a fragment of the Spike glycoprotein. In some embodiments, the Spike glycoprotein or a fragment thereof is a monomer or a trimer. In some embodiments, the Spike glycoprotein or a fragment thereof is prefusion stabilized form of Spike glycoprotein or fragment thereof. In some embodiments, the viral antigen of the Spike glycoprotein or a fragment thereof is at least 50%, 55%, 60%, 65%, 70%, 75%, 80%, 85%, 90%, 95%, 96%, 97%, 98%, or 99% identical to any one of SEQ ID NOS: 2-6, 11-12, 24, 47-48, 71-72, 95-96, or 115. In some embodiments, the viral antigen of the Spike glycoprotein or a fragment thereof is 100% identical to any one of SEQ ID NOS: 2-6, 11-12, 24, 47-48, 71-72, 95-96, or 115. In some embodiments, the viral antigen of the Spike glycoprotein or a fragment thereof comprises 1, 2, 3, 4, 5, 6, 7, 8, 9, 10, 11, 12, 13, 14, 15, 16, 17, 18, 19, 20, 21, 22, 23, 24, or 25 or more of the mutations to SEQ ID NO: 5 listed in Table 1. In some embodiments, the viral antigen of the Spike glycoprotein or a fragment thereof comprise an amino acid length at least 5 amino acids, 10 amino acids, 20 amino acids, 25 amino acids, 50 amino acids, 100 amino acids, 200 amino acids, or more. In embodiments, the viral antigen comprising the Spike glycoprotein or a fragment thereof induces formation of neutralizing antibody against the Spike-glycoprotein or a fragment thereof in a subject after administration of the vaccine.

[0288] In some embodiments, the vaccine comprises displaying, conjugating, or complexing the viral antigen with cell-based carrier, polymer (e.g. polyester), or extra cellular vesicles such as exosomes, microvesicles, retrovirus-like particles, apoptotic bodies, apoptosomes, oncosomes, exophers, enveloped viruses, exomeres, or other very large extracellular vesicles.

[0289] In some embodiments, the vaccine comprises at least one heterologous polynucleotide encoding the viral antigen described herein. In some embodiments, the heterologous polynucleotide comprises a viral vector or a plasmid. Non-limiting examples of heterologous polynucleotides include coding or non-coding regions of a gene or gene fragment, loci (locus) defined from linkage analysis, exons, introns, messenger RNA (mRNA), self-amplifying RNA, uridine containing RNA (uRNA), self-amplifying mRNA, transfer RNA (tRNA), ribosomal RNA (rRNA), short interfering RNA (siRNA), short-hairpin RNA (shRNA), micro-RNA (miRNA), ribozymes, cDNA, recombinant polynucleotides, branched polynucleotides, plasmids, vectors, isolated DNA of any sequence, isolated RNA of any sequence, cell-free polynucleotides including cell-free DNA (cfDNA) and cell-free RNA (cfRNA), nucleic acid probes, and primers. The sequence of nucleotides is interrupted by non-nucleotide components. In some embodiments, the viral antigen translated from the heterologous polynucleotide induces formation of neutralizing antibody against the viral antigen in a subject after administration of the vaccine.

[0290] In some embodiments, the heterologous DNA sequence is transcribed into mRNA and then translated into the viral antigen after administration of the vaccine to the subject. In some embodiments, the viral antigen translated from the heterologous DNA sequence induces formation of neutralizing antibody against the viral antigen in a subject after administration of the vaccine. In some embodiments, the viral antigen comprising Spike glycoprotein or a fragment thereof is translated from the heterologous DNA sequence and induce formation of neutralizing antibody against the Spike glycoprotein or fragment thereof in a subject after administration of the vaccine.

[0291] In some embodiments, the vaccine comprises mRNA encoding Spike glycoprotein or a fragment thereof. In some embodiments, the vaccine comprises the heterologous mRNA, where the mRNA is a self-amplifying mRNA (saRNA). In some embodiments, the vaccine comprises the heterologous mRNA, where the mRNA comprises uridine (uRNA). In some embodiments, the heterologous RNA sequence is translated into the viral antigen after administration of the vaccine to the subject. In some embodiments, the viral antigen translated from the heterologous RNA sequence induces formation of neutralizing antibody against the viral antigen in a subject after administration of the vaccine. In some embodiments, the viral antigen comprising Spike glycoprotein or a fragment thereof is translated from the heterologous RNA sequence and induce formation of neutralizing antibody against the Spike glycoprotein or fragment thereof in a subject after administration of the vaccine. In some embodiments, the vaccine is mRNA-1273, which encodes a fill-length, prefusion stabilized Spike (S) protein. In some embodiments, the vaccine is BNT162 vaccine, comprising mRNA or modified mRNA to express the Spike (S) protein or a fragment thereof. In some instances, the BNT162 vaccine comprises nucleoside modified mRNA (modRNA), uridine containing mRNA (uRNA), or self-amplifying mRNA (saRNA),

[0292] In some embodiments, the vaccine comprising the at least one heterologous polynucleotide encoding the viral antigen comprises one or more DNA or RNA vectors. In some embodiments, the DNA or RNA vectors is plasmids. In some embodiments, the DNA or RNA vectors is viral vector. Viral vectors, and especially retroviral vectors, are engineered to contain a nucleic acid molecule with a sequence encoding any one of the viral antigens described herein and to be delivered to a target tissue. In some embodiments, the viral vectors are derived from lentivirus, poxviruses, herpes simplex virus I, adenoviruses and adeno-associated viruses, and the like. Non-limiting examples of viral vectors include retroviral vectors, adenoviral vectors, adeno-associated viral vectors (AAVs), pox vectors, parvoviral vectors, baculovirus vectors, measles viral vectors, or herpes simplex virus vectors (HSVs). In some instances, the retroviral vectors include gamma-retroviral vectors such as vectors derived from the Moloney Murine Keukemia Virus (MoMLV, MMLV, MuLV, or MLV) or the Murine Steam cell Virus (MSCV) genome. In some embodiments, the retroviral vectors also include lentiviral vectors such as those derived from the human immunodeficiency virus (HIV) genome. In some embodiments, AAV vectors include AAV1, AAV2, AAV4, AAV5, AAV6, AAV7, AAV8, or AAV9 serotype. In some embodiments, the viral vector is a chimeric viral vector, comprising viral portions from two or more viruses. In additional embodiments, the viral vector is a recombinant viral vector. In some embodiments, the vaccine is an Ad5-nCoC vaccine comprising nucleic acid sequence encoding the Spike protein. In some embodiments, the vaccine is AZD-1222 vaccine comprising a replication-deficient chimpanzee adenovirus, ChAdOx1, which is engineered to express the Spike (S) protein. In some embodiments, the vaccine is INO-4800 vaccine comprising pGX DNA plasmid with nucleic acid encoding the Spike (S) protein.

[0293] In some embodiments, the vaccine comprises adjuvant. In some instances, the vaccine comprises immune modulator selected from any one of the biomarkers described herein.

### Companion or Complementary Diagnostic

[0294] Described herein, in some embodiments, are companion complementary diagnostic testing devices or system and methods of their use. In some embodiments, the companion diagnostic testing device or system is used to determine the efficacy or effectiveness of a vaccine against a pathogen described herein. In some embodiments, the companion diagnostic testing device or system is used to identify a person in need of the vaccine. A “companion diagnostic” as used herein, refers to a diagnostic test that may be required for administration of a therapeutic agent for the treatment or prevention of a disease caused by a pathogen disclosed herein. A “complementary diagnostic,” refers to a diagnostic test that may be optional for administration of the therapeutic agent.

[0295] In some embodiments, the method determines the efficacy or effectiveness of a vaccine described herein by detecting presence, absence, or quantity of neutralizing antibody against the pathogen in a biological sample from a subject that was administered the vaccine. In some embodiments, the companion diagnostic method confirms adaptive immunity against a pathogen in a subject or in a population of subjects. In some embodiments, the method confirms the need for vaccination against the pathogen for a subject or for a population of subjects. In some embodiments, the companion diagnostic method confirms the prevalent of infection by the pathogen in a population. In some embodiments, the companion diagnostic method identifies a subject or subjects in a population, who are most likely to benefit from being vaccinated with any one of the vaccine described herein. In some embodiments, the companion diagnostic method identifies a subject or subjects in a population, who are likely to be at increased risk for serious side effects as a result of being vaccinated. In some embodiments, the companion diagnostic method monitors response to vaccination for the purpose of adjusting the dosage or the frequency of vaccination to achieve improved safety, efficacy, or effectiveness of the vaccine. For example, based on efficacy results, subjects aged 65 or older may receive a dosage that contains two times, three times, four times, five times, six times, seven times, eight times, nine times, or ten or more times the amount of an antigen than a dosage for subjects aged 64 or younger. In some embodiments, the companion diagnostic method comprises utilizing the biomarker panel described herein.

[0296] Companion diagnostic methods provided herein comprise: (a) providing a biological sample from a subject in need thereof; (b) measuring a presence, an absence, or a level of a labeled complex between at least two of (i) a capture molecule, (ii) a peptide-conjugate comprising a peptide derived from a pathogen, and (iii) a neutralizing antibody against the pathogen; and (c) classifying the biological sample as having a presence or quantity of the labeled complex. In some embodiments, the method further comprises identifying a vaccine administered to the subject as effective to induce a sufficient or insufficient adaptive immune response against the pathogen in the subject, provided the biological sample is classified as having the presence or the quantity of the labeled complex between (ii) and (iii). In some embodiments, the method further comprises identifying the subject as in need for a vaccine against the pathogen, provided the biological sample is classified as having the presence or the quantity of the labeled complex between (i) and (ii). In some embodiments, performing (a)-(c) is required for administering the vaccine to the subject (or a population of subjects). In some embodiments, the method further comprises identifying a vaccine administered to the subject as not effective to induce a sufficient or insufficient adaptive immune response against the pathogen in the subject, provided the biological sample is classified as having the presence or the quantity of the labeled complex between (i) and (ii).

[0297] In some embodiments, the level is high relative to an index or a control. In some embodiments, the vaccine is effective, provided the presence or the level of the labeled complex between the peptide-conjugate and the neutralizing antibody against the pathogen is measured. In some embodiments, the vaccine is not effective, provided the presence or the level of the labeled complex between the peptide-conjugate and the capture molecule is measured.

[0298] In some embodiments, method described herein comprises administering a therapeutic agent to a subject in need thereof, provided the subject is identified as having an acute infection by a pathogen. In some embodiments, the therapeutic agent is effective to reduce or eliminate the acute infection by the pathogen, such as an anti-viral therapeutic agent.

[0299] In some embodiments, the companion diagnostic method is performed prior to treating the subject with the therapeutic agent. In some embodiments, performing the companion diagnostic method is required prior to treating the subject with the therapeutic agent. In some embodiments, the therapeutic agent is an anti-viral therapeutic agent. In some embodiments, the anti-viral therapeutic agent treats a disease or condition associated with SARS-CoV-2. In some embodiments, the pathogen is a virus. In some embodiments, the virus is SARS-CoV-2.

[0300] In some embodiments, the companion diagnostic method further comprises identifying the subject as having the acute infection comprises by determining the presence, absence, or a quantity of any one of the biomarkers described herein. In some embodiments, the companion diagnostic method comprises determining the presence, absence, or a quantity of both neutralizing antibody and biomarker. In some embodiments, the biomarker is interleukin 6 (IL-6).

[0301] Described herein, in some embodiments, are complementary diagnostic testing devices and methods of their use to determine to test the biological sample of the subject, where the subject does not display the symptoms of being infected by or is not exposed to any one of the pathogen described herein. In some embodiments, the complementary diagnostic method determines the benefit-risk decision-making about vaccinating the subject or vaccinating the population, where the difference in benefit-risk is clinically meaningful. In some embodiments, the complementary diagnostic method determines the need to vaccinate a subject or subjects of a population, when the status or prevalence of infection by any one of the pathogen described herein is unknown. In some embodiments, the complementary diagnostic method determines the need to vaccinate or treat the subject or subjects of a population, when the status or prevalence of infection by any one of the pathogen described herein is unknown. For example, a subject or subjects of a population have displayed symptoms of respiratory disease or disorder.

[0302] In some embodiments, the complementary diagnostic method confirms the particular pathogen that is causing the respiratory disease or disorder in the absence of a reason to test for that particular pathogen. In some embodiments, the complementary diagnostic method determines the efficacy or effectiveness of a vaccine. For example, a vaccine designed for one disease is showing unexpected protective effect against a different disease caused by a different pathogen. In some embodiments, the complementary diagnostic method identifies a subject or subjects in a population, who are most likely to benefit from being vaccinated with any one of the vaccine described herein. In some embodiments, the complementary diagnostic method identifies a subject or subjects in a population, who are likely to be at increased risk for serious side effects as a result of being vaccinated. In some embodiments, the complementary diagnostic method monitors response to vaccination for the purpose of adjusting the dosage or the frequency of vaccination to achieve improved safety, efficacy, or effectiveness of the vaccine. For example, based on response results, subjects aged 65 or older may receive a dosage that contains two times, three times, four times, five times, six times, seven times, eight times, nine times, or ten or more times the amount of an antigen than a dosage for subjects aged 64 or younger. In some embodiments, the complementary diagnostic method comprises utilizing the biomarker panel described herein.

### Biomarker Panel

[0303] Described herein, in some embodiments, are methods utilizing the systems, devices, and compositions describe herein for detecting presence, absence, quantity, or activity of a biomarker described herein. In some embodiments, the biomarkers are associated with infection by any one of the pathogens described herein. In some embodiments, the biomarkers are induced by infection by the pathogen. In some embodiments, the biomarkers are cytokines induced by infection. In some embodiments, the biomarkers are serological biomarkers. The quantity or activity of the biomarkers can increase or decrease after the infection. In some embodiments, the biomarkers may comprise a peptide or protein that is encoded by a nucleic acid sequence, or that has an amino acid sequence, that is at least 80% identical to any one of SEQ ID NOS: 21-23, 25-42, 44-46, 49-66, 68-70, 73-90, 92-94, or 97-114.

[0304] Biomarker panel methods provided herein comprise: (a) providing a biological sample from a subject in need thereof; (b) measuring a presence, an absence, level, or activity of at least one biomarker; (c) classifying the biological sample as having a presence or level of the biomarker associated or induced by an infection; and optionally (d) measuring a presence, an absence, or quantity of neutralizing antibody induced by the infection. In some embodiments, the method identifies the infection caused by the pathogen based on the quantity or activity of the biomarker. In some embodiments, the method identifies the infection caused by the pathogen based on the quantity or activity of the biomarker in a subject, who does not have neutralizing antibody against the pathogen. In some embodiments, the method confirms the infection caused by the pathogen based on the quantity or activity of the biomarker. In some embodiments, the method confirms the infection caused by the pathogen based on the quantity or activity of the biomarker in a subject, who does not have neutralizing antibody against the pathogen. In some embodiments, the method comprise prognosing an immunity or measuring susceptibility to infection based on detecting presence, absence, level, or activity of the biomarkers described herein. In some embodiments, the method comprise prognosing an immunity or measuring susceptibility to infection based on detecting presence, absence, quantity, or activity of the biomarkers in combination with detecting presence, absence, or quantity of the neutralizing antibodies described herein to confirm an infection caused by any one of the pathogen described herein.

[0305] In some embodiments, the presence, absence, level, or activity of the biomarker is detected. In some embodiments, the method detects presence absence, level, or activity of at least one, two, three, four, five, 10, 20, 30, 40, 50, 60, 70, 80, 90, 100, 200, 500, 1000 or more biomarkers of the biomarker panel in a biological sample. In some embodiments, the method detects biomarker comprising a non-peptide coding nucleic acid sequence. In some embodiments, the method detects biomarker comprising a peptide-coding nucleic acid sequence such as mRNA or cDNA. In some embodiments, the method detects biomarker comprising peptide or protein.

[0306] In some instances, the method detects presence, absence, or level, or activity of the biomarker by utilizing a nucleic acid sequence by subjecting a biological sample to a nucleic acid-based detection assay. The nucleic acid-based detection assay comprises quantitative polymerase chain reaction (qPCR), gel electrophoresis (including for e.g., Northern or Southern blot), immunochemistry, in situ hybridization such as fluorescent in situ hybridization (FISH), cytochemistry, or sequencing. The sequencing technique comprises next generation sequencing. In some embodiments, the method involves a hybridization assay such as fluorogenic qPCR (e.g., TaqMan™, SYBR green, SYBR green I, SYBR green II, SYBR gold, ethidium bromide, methylene blue, Pyronin Y, DAPI, acridine orange, Blue View or phycoerythrin), which involves a nucleic acid amplification reaction with a specific primer pair, and hybridization of the amplified nucleic acid probes comprising a detectable moiety or molecule that is specific to a target nucleic acid sequence. In some instances, a number of amplification cycles for detecting a target nucleic acid in a qPCR assay is about 5 to about 30 cycles. In some instances, the number of amplification cycles for detecting a target nucleic acid is at least about 5 cycles. In some instances, the number of amplification cycles for detecting a target nucleic acid is at most about 30 cycles. In some instances, the number of amplification cycles for detecting a target nucleic acid is about 5 to about 10, about 5 to about 15, about 5 to about 20, about 5 to about 25, about 5 to about 30, about 10 to about 15, about 10 to about 20, about 10 to about 25, about 10 to about 30, about 15 to about 20, about 15 to about 25, about 15 to about 30, about 20 to about 25, about 20 to about 30, or about 25 to about 30 cycles. For TaqMan™ methods, the probe may be a hydrolysable probe comprising a fluorophore and quencher that is hydrolyzed by DNA polymerase when hybridized to a target nucleic acid. In some cases, the presence of a target nucleic acid is determined when the number of amplification cycles to reach a threshold value is less than 30, 29, 28, 27, 26, 25, 24, 23, 22, 21, or 20 cycles. In some instances, hybridization may occur at standard hybridization temperatures, e.g., between about 35° C. and about 65° C. in a standard PCR buffer. An additional exemplary nucleic acid-based detection assay comprises the use of nucleic acid probes conjugated or otherwise immobilized on a bead, multi-well plate, or other substrate, wherein the nucleic acid probes are configured to hybridize with a target nucleic acid sequence. In some instances, the nucleic acid probe is specific to one or more genetic variants disclosed herein is used. In some instances, the nucleic acid probe specific to a SNP or SNV comprises a nucleic acid probe sequence sufficiently complementary to a risk or protective allele of interest, such that hybridization is specific to the risk or protective allele. In some instances, the nucleic acid probe specific to an indel comprises a nucleic acid probe sequence sufficiently complementary to an insertion of a nucleobase within a polynucleotide sequence flanking the insertion, such that hybridization is specific to the indel. In some instances, the nucleic acid probe specific to an indel comprises a probe sequence sufficiently complementary to a polynucleotide sequence flanking a deletion of a nucleobase within the polynucleotide sequence, such that hybridization is specific to the indel. In some instances, the nucleic acid probe specific to a biomarker comprises a nucleic acid probe sequence sufficiently complementary to the polynucleotide sequence of the biomarker. In some instances, the biomarker comprises a transcribed polynucleotide sequence (e.g., RNA, cDNA). In some embodiments, the nucleic acid probe is, for example, a full-length cDNA, or a portion thereof, such as an oligonucleotide of at least about 7, 8, 9, 10, 11, 12, 13, 14, 15, 20, 25, 30, 35, 40, 45, or 50 nucleotides in length and sufficient to specifically hybridize under standard hybridization conditions to the target nucleic acid sequence. In some embodiments, the target nucleic acid sequence is immobilized on a solid surface and contacted with a probe, for example by running the isolated target nucleic acid sequence on an agarose gel and transferring the target nucleic acid sequence from the gel to a membrane, such as nitrocellulose. In some embodiments, the probe(s) are immobilized on a solid surface, for example, in an Affymetrix gene chip array, and the probe(s) are contacted with the target nucleic acid sequence.

[0307] In some instances, the method detects presence, absence, or level, or activity of the biomarker by utilizing a protein-based assay. In some embodiments, the method detects the biomarker by an antibody-based assay, where an antibody specific to the biomarker is utilized. In some embodiments, antibody-based detection method can utilize an antibody that binds to any region of the biomarker. Another exemplary method of detecting the biomarker comprises performing an enzyme-linked immunosorbent assay (ELISA). The ELISA assay is a sandwich ELISA or a direct ELISA. Another exemplary method of detecting the biomarker comprises a single molecule array, e.g., Simoa. Other exemplary methods of detecting biomarkers can include immunohistochemistry, lateral flow assay, gel electrophoresis, capillary electrophoresis, high performance liquid chromatography (HPLC), thin layer chromatography (TLC), hyperdiffusion chromatography, or various immunological methods such as fluid or gel precipitation reactions, immunodiffusion (single or double), immunoelectrophoresis, radioimmunoassay (RIA), immunofluorescent assays, and Western blotting. In some embodiments, antibodies, or antibody fragments, is used in methods such as Western blots or immunofluorescence techniques to detect the expressed proteins. The antibody or protein is immobilized on a solid support for Western blots and immunofluorescence techniques. Suitable solid phase supports or carriers include any support capable of binding an antigen or an antibody. Exemplary supports or carriers include glass, polystyrene, polypropylene, polyethylene, dextran, nylon, amylases, natural and modified celluloses, polyacrylamides, gabbros, and magnetite.

### Data Analysis Using Personal Electronic Device

[0308] Methods disclosed herein further comprise: (a) capturing an image of a detection zone of the testing device; and (b) analyzing data from the image using one or more computer programs. In some embodiments, the one or more computer programs is run on a computing device described here. In some embodiments, capturing is performed with an imaging device described herein. In some cases, capturing and analyzing are performed by a single personal electronic device, such as a smartphone, tablet, or laptop computer. In some embodiments, capturing and analyzing are performed at the point of need (e.g., same time and place as performing the assay with the testing device).

[0309] In some embodiments, capturing comprises taking a still photograph of a liquid phase, such as a liquid composition disclosed herein. In some embodiments, capturing comprises taking a still photograph of the solid surface of the assay assembly described herein. In some embodiments, capturing comprises taking a video of the solid surface of the assay assembly.

[0310] In some embodiments, analyzing comprises detecting binding between the analyte (antibody against an antigenic peptide from the pathogen) and peptide-conjugate. In some embodiments, analyzing comprises subtracting a background signal, thereby increasing the signal to noise ratio. In some embodiments, analyzing is performed by a data analytics module of an application or computer program of the computing device. In some embodiments, the analyzing by the data analytics module comprises performing machine learning.

### Kits

[0311] Described herein, in some embodiments, are kits for obtaining a biological sample or detecting an analyte in the biological sample. In some embodiments, the kits may comprise a biological sample collection device, such as, for example, a transdermal puncture device (e.g., finger prick lance) or other sample collection device (e.g., a swab). In some embodiments, the kits may comprise a dried blood spot (DBS) card described herein for storing the biological sample. In some embodiments, the kits comprise an assay assembly described herein, such as a lateral flow assay or an ELISA that is capable of detecting neutralizing antibodies against a pathogen of interest in the biological sample.

[0312] In some embodiments, the kits described herein comprise instructions. In some embodiments, the instructions provide information about how to obtain the biological sample. In some embodiments, the instructions comprise information about how to discard the biological sample. In some embodiments, the kits comprise information about how to download a mobile application for a personal electronic device that captures and analyzes the results of the testing device. In some embodiments, the kits comprise a survey having one or more clinical questions pertaining to a symptom of an infection by a pathogen of interest. In some embodiments, the survey is on the back of the DBS card of the kit.

### Embodiments

[0313] The following non-limiting embodiments provide illustrative examples of the disclosure, but do not limit the scope of the disclosure.

[0314] Embodiment 1. A system comprising: (a) one or more capture molecules derived from an angiotensin-converting enzyme 2 (ACE2) receptor; and (b) a peptide-conjugate comprising: (i) a peptide derived from a spike glycoprotein of a coronavirus; and (ii) a detectable moiety.

[0315] Embodiment 2. The system of embodiment 1 further comprises (a) a surface; and (b) an imaging device configured to capture an image of a complex between the peptide-conjugate and the one or more capture molecules on the surface when the complex is coupled to the surface.

[0316] Embodiment 3. The system of any one of embodiments 1-2 further comprises an imaging device configured to capture an image of a complex between the peptide-conjugate and the one or more capture molecules.

[0317] Embodiment 4. The system of any one of embodiments 1-3 comprises a container comprising (a) and (b), wherein the container is portable.

[0318] Embodiment 5. The system of any one of embodiments 1-4 is a point of need system.

[0319] Embodiment 6. The system of any one of embodiments 1-5 is a point of care system.

[0320] Embodiment 7. The system of any one of embodiments 1-6, wherein the surface comprises a material selected from the group consisting of a metal, a plastic, glass, and a nitrocellulose membrane.

[0321] Embodiment 8. The system of any one of embodiments 1-7, wherein the surface is a passivated surface.

[0322] Embodiment 9. The system of any one of embodiments 1-8, wherein the passivated surface comprises a polymer layer comprising a molecule selected from the group consisting of polyethylene glycol (PEG), poly(vinyl alcohol) (PVA), poly(vinyl pyridine), poly(vinyl pyrrolidone) (PVP), poly(acrylic acid) (PAA), polyacrylamide, poly(N-isopropylacrylamide) (PNIPAM), poly(methyl methacrylate) (PMA), poly(2-hydroxylethyl methacrylate) (PHEMA), poly(oligo(ethylene glycol) methyl ether methacrylate) (POEGMA), polyglutamic acid (PGA), poly-lysine, poly-glucoside, streptavidin, and dextran.

[0323] Embodiment 10. The system of any one of embodiments 1-9, wherein the complex is coupled to the surface.

[0324] Embodiment 11. The system of any one of embodiments 1-10, wherein, the complex is coupled to the surface by a covalent bond, a linker, or a combination thereof.

[0325] Embodiment 12. The system of any one of embodiments 1-11, wherein the linker is a chemical linker, a peptide linker, or a combination thereof.

[0326] Embodiment 13. The system of any one of embodiments 1-12, wherein the one or more capture molecules comprises two or more capture molecules.

[0327] Embodiment 14. The system of any one of embodiments 1-13, wherein the one or more capture molecules is coupled to the surface.

[0328] Embodiment 15. The system of any one of embodiments 1-14, wherein the one or more capture molecules is coupled to the surface by a covalent bond, a linker, or a combination thereof.

[0329] Embodiment 16. The system of any one of embodiments 1-15, wherein the linker is a chemical linker, a peptide linker, or a combination thereof.

[0330] Embodiment 17. The system of any one of embodiments 1-16, wherein the one or more capture molecules is a fusion polypeptide.

[0331] Embodiment 18. The system of any one of embodiments 1-17, wherein the fusion polypeptide comprises at least a portion of a fragment crystallizable region (Fc) region of a monoclonal antibody.

[0332] Embodiment 19. The system of any one of embodiments 1-18, wherein the one or more capture molecules is bound by an antibody that is coupled to the surface.

[0333] Embodiment 20. The system of any one of embodiments 1-19, wherein the peptide-conjugate comprises a nanoparticle, a fluorescent dye, an enzymatic label, or a colorimetric label, or a combination thereof.

[0334] Embodiment 21. The system of any one of embodiments 1-20, wherein the nanoparticle comprises a material selected from the group consisting of a metal, agarose, acrylic, and plastic.

[0335] Embodiment 22. The system of any one of embodiments 1-21, wherein the nanoparticle is magnetic.

[0336] Embodiment 23. The system of any one of embodiments 1-22, the nanoparticle is conjugated to the peptide by a linker comprising a chemical linker, a peptide linker, or a combination thereof.

[0337] Embodiment 24. The system of any one of embodiments 1-23, wherein, the one or more capture molecules derived from the ACE2 receptor comprises an amino acid sequence that is at least 70%, 75%, 80%, 85%, 90%, 91%, 92%, 93%, 94%, 95%, 96%, 97%, 98%, 99%, 100% identical to SEQ ID NO: 1.

[0338] Embodiment 25. The system of any one of embodiments 1-24, wherein, the peptide derived from a spike glycoprotein of a coronavirus comprises at least a portion of a spike protein derived from Severe acute respiratory syndrome-associated coronavirus (SARS-CoV).

[0339] Embodiment 26. The system of any one of embodiments 1-25, wherein the SARS-CoV is SARS-CoV-2.

[0340] Embodiment 27. The system of any one of embodiments 1-26, wherein an infection in a human subject by the SARS-CoV-2 causes coronavirus disease of 2019 (COVID-19) in the human subject.

[0341] Embodiment 28. The system of any one of embodiments 1-27, wherein the at least a portion of the spike protein comprises a subunit 1 of the spike protein.

[0342] Embodiment 29. The system of any one of embodiments 1-28, wherein the at least a portion of the spike protein comprises a receptor binding domain (RBD) of the subunit 1 of the spike protein.

[0343] Embodiment 30. The system of any one of embodiments 1-29, wherein the at least a portion of the spike protein comprises an amino acid sequence that is at least 70%, 75%, 80%, 85%, 90%, 91%, 92%, 93%, 94%, 95%, 96%, 97%, 98%, 99%, 100% identical to SEQ ID NO: 2.

[0344] Embodiment 31. The system of any one of embodiments 1-30, wherein the at least a portion of the spike protein comprises an amino acid sequence that is at least 70%, 75%, 80%, 85%, 90%, 91%, 92%, 93%, 94%, 95%, 96%, 97%, 98%, 99%, 100% identical to SEQ ID NO: 3.

[0345] Embodiment 32. The system of any one of embodiments 1-31, wherein the at least a portion of the spike protein comprises an amino acid sequence that is at least 70%, 75%, 80%, 85%, 90%, 91%, 92%, 93%, 94%, 95%, 96%, 97%, 98%, 99%, 100% identical to SEQ ID NO: 4.

[0346] Embodiment 33. The system of any one of embodiments 1-32, wherein the complex between the peptide-conjugate and the one or more capture molecules on the surface is visible on the surface using color, reflectance, fluorescence, bioluminescence, or chemiluminescence.

[0347] Embodiment 34. The system of any one of embodiments 1-33, where the system further comprises a housing at least partially enclosing the surface.

[0348] Embodiment 35. The system of any one of embodiments 1-34, wherein the system further comprises a sample receptor configured to receive a biological sample from a subject.

[0349] Embodiment 36. The system of any one of embodiments 1-35, wherein the sample receptor is mechanically coupled to a housing at least partially enclosing the surface.

[0350] Embodiment 37. The system of any one of embodiments 1-36, wherein the biological sample comprises one or more antibodies specific to the peptide.

[0351] Embodiment 38. The system of any one of embodiments 1-37, wherein the biological sample does not consist of one or more antibodies specific to the peptide. Embodiment 10. the one or more antibodies belong to one or more immunoglobulin classes comprising immunoglobulin M, immunoglobulin G, immunoglobulin A, immunoglobulin E, and immunoglobulin D. Embodiment 10. the subject was, or is, exposed to the coronavirus.

[0352] Embodiment 39. The system of any one of embodiments 1-38, wherein exposure of the subject to the coronavirus is unknown.

[0353] Embodiment 40. The system of any one of embodiments 1-39, wherein the subject was administered a vaccine against the coronavirus.

[0354] Embodiment 41. The system of any one of embodiments 1-40, wherein the biological sample comprises blood, urine, saliva, or feces.

[0355] Embodiment 42. The system of any one of embodiments 1-41, wherein the blood is capillary blood.

[0356] Embodiment 43. The system of any one of embodiments 1-42, wherein the system further comprises a transdermal puncture device configured to obtain the capillary blood from the subject.

[0357] Embodiment 44. The system of any one of embodiments 1-43, wherein the sample receptor comprises a filter to separate serum from the blood.

[0358] Embodiment 45. The system of any one of embodiments 1-44, wherein the system further comprises a data store for storing data from the image that is captured by the imaging device.

[0359] Embodiment 46. The system of any one of embodiments 1-45, wherein the data store is a cloud-based or a web-based data store, or a local data store.

[0360] Embodiment 47. The system of any one of embodiments 1-46, wherein the data comprises one or more of geolocation of the imaging device, a result from the image captured by the imaging device, and external data.

[0361] Embodiment 48. The system of any one of embodiments 1-47, wherein the external data is data from an external device selected from a diagnostic device, a prognostic device, or a health or fitness tracking device.

[0362] Embodiment 49. The system of any one of embodiments 1-48, wherein the external data comprises body temperature, heart rate variability, resting heart rate, sleep quality, and sleep quantity.

[0363] Embodiment 50. The system of any one of embodiments 1-49, wherein the system further comprises an external device selected from a diagnostic device, a prognostic device, or a health or fitness tracking device.

[0364] Embodiment 51. The system of any one of embodiments 1-50, wherein the imaging device is a personal electronic device.

[0365] Embodiment 52. The system of any one of embodiments 1-51, wherein the personal electronic device is a smart phone, tablet, body camera, web camera, or personal computer.

[0366] Embodiment 53. The system of any one of embodiments 1-52, wherein the personal electronic device comprises a web-based portal.

[0367] Embodiment 54. The system of any one of embodiments 1-53, wherein the web-based portal utilizes an application.

[0368] Embodiment 55. The system of any one of embodiments 1-54, wherein the application is configured to receive data comprising a result from the image captured by the personal electronic device, a geolocation of the personal electronic device, and external data from one or more external device.

[0369] Embodiment 56. The system of any one of embodiments 1-55, wherein the application comprises a data analytics module configured to analyze the result by: (a) determining whether the result is a positive result or a negative result, wherein a positive results indicates immunity and a negative results indicates a lack of immunity; (b) determining an absolute number of complexes between the peptide-conjugate and the ACE2 receptor on the surface; or (c) determining a level of binding between the peptide-conjugate and the ACE2, wherein a high level of binding indicates a low level of immunity, and a low level of binding indicates a high level of immunity.

[0370] Embodiment 57. The system of any one of embodiments 1-56, wherein the positive or the negative result is relative to a threshold number of complexes between the peptide-conjugate and the ACE2 receptor on the surface.

[0371] Embodiment 58. The system of any one of embodiments 1-57, wherein the threshold number is predetermined relative to an index a control.

[0372] Embodiment 59. The system of any one of embodiments 1-58, wherein the data analytics module is further configured to normalize the result by subtracting background noise.

[0373] Embodiment 60. The system of any one of embodiments 1-59, wherein the data analytics module is further configured to identify a geographical location comprised of subjects for which a positive result was determined to detect a presence of herd immunity to the coronavirus, or recommend further testing.

[0374] Embodiment 61. The system of any one of embodiments 1-60, wherein the data analytics module utilizes geofencing from coordinates of the personal electronic device to identify the geographical location.

[0375] Embodiment 62. The system of any one of embodiments 1-61, wherein the data analytics module utilizes a machine learning algorithm, artificial intelligence, or both.

[0376] Embodiment 63. The system of any one of embodiments 1-62, wherein system further comprises one or more capture molecules specific to one or more antibodies against the coronavirus.

[0377] Embodiment 64. The system of any one of embodiments 1-63, wherein the one or more capture molecules specific to one or more antibodies against the coronavirus is labeled.

[0378] Embodiment 65. The system of any one of embodiments 1-64, wherein system further comprises a labeled secondary capture molecule specific to the one or more capture molecules specific to one or more antibodies against the coronavirus.

[0379] Embodiment 66. The system of any one of embodiments 1-65, wherein the one or more capture molecules specific to one or more antibodies against the coronavirus is an antibody or antigen-binding fragment. Embodiment 10. the antibody or antigen-binding fragment is monoclonal. antibody or antigen-binding fragment is polyclonal.

[0380] Embodiment 67. Aspects disclosed herein comprise system comprising: (a) one or more capture molecules derived from a spike glycoprotein of a coronavirus; (b) a peptide-conjugate comprising: (i) a peptide derived from angiotensin-converting enzyme 2 (ACE2) receptor; and (ii) a detectable moiety.

[0381] Embodiment 68. The system of embodiment 67, wherein the system further comprises (a) a surface; and (b) an imaging device configured to capture an image of a complex between the peptide-conjugate and the one or more capture molecules on the surface when the complex is coupled to the surface.

[0382] Embodiment 69. The system of any one of embodiments 67-68, wherein the system further comprises an imaging device configured to capture an image of a complex between the peptide-conjugate and the one or more capture molecules.

[0383] Embodiment 70. The system of any one of embodiments 67-69, wherein the system further comprises a container comprising (a) and (b), wherein the container is portable.

[0384] Embodiment 71. The system of any one of embodiments 67-70, wherein the system is a point of need system.

[0385] Embodiment 72. The system of any one of embodiments 67-71, wherein the point of need is a point of care system.

[0386] Embodiment 73. The system of any one of embodiments 67-72, wherein the surface comprises a material selected from the group consisting of a metal, a plastic, glass, and a nitrocellulose membrane.

[0387] Embodiment 74. The system of any one of embodiments 67-73, wherein the surface is a passivated surface.

[0388] Embodiment 75. The system of any one of embodiments 67-74, wherein the passivated surface comprises a polymer layer comprising a molecule selected from the group consisting of polyethylene glycol (PEG), poly(vinyl alcohol) (PVA), poly(vinyl pyridine), poly(vinyl pyrrolidone) (PVP), poly(acrylic acid) (PAA), polyacrylamide, poly(N-isopropylacrylamide) (PNIPAM), poly(methyl methacrylate) (PMA), poly(2-hydroxylethyl methacrylate) (PHEMA), poly(oligo(ethylene glycol) methyl ether methacrylate) (POEGMA), polyglutamic acid (PGA), poly-lysine, poly-glucoside, streptavidin, and dextran.

[0389] Embodiment 76. The system of any one of embodiments 67-75, wherein the complex is coupled to the surface.

[0390] Embodiment 77. The system of any one of embodiments 67-76, wherein the complex is coupled to the surface by a covalent bond, a linker, or a combination thereof.

[0391] Embodiment 78. The system of any one of embodiments 67-77, wherein the linker is a chemical linker, a peptide linker, or a combination thereof.

[0392] Embodiment 79. The system of any one of embodiments 67-78, wherein the one or more capture molecules comprises two or more capture molecules.

[0393] Embodiment 80. The system of any one of embodiments 67-79, wherein the one or more capture molecules is coupled to the surface.

[0394] Embodiment 81. The system of any one of embodiments 67-80, wherein the one or more capture molecules is coupled to the surface by a covalent bond, a linker, or a combination thereof.

[0395] Embodiment 82. The system of any one of embodiments 67-81, wherein the linker is a chemical linker, a peptide linker, or a combination thereof.

[0396] Embodiment 83. The system of any one of embodiments 67-82, wherein the one or more capture molecules is a fusion polypeptide.

[0397] Embodiment 84. The system of any one of embodiments 67-83, wherein the fusion polypeptide comprises at least a portion of a fragment crystallizable region (Fc) region of a monoclonal antibody.

[0398] Embodiment 85. The system of any one of embodiments 67-84, wherein the one or more capture molecules is bound by an antibody that is coupled to the surface.

[0399] Embodiment 86. The system of any one of embodiments 67-85, wherein the peptide-conjugate comprises a nanoparticle, a fluorescent dye, an enzymatic label, or a colorimetric label, or a combination thereof.

[0400] Embodiment 87. The system of any one of embodiments 67-86, wherein the nanoparticle comprises a material selected from the group consisting of a metal, agarose, acrylic, and plastic.

[0401] Embodiment 88. The system of any one of embodiments 67-87, wherein the nanoparticle is magnetic.

[0402] Embodiment 89. The system of any one of embodiments 67-88, wherein the nanoparticle is conjugated to the peptide by a linker comprising a chemical linker, a peptide linker, or a combination thereof.

[0403] Embodiment 90. The system of any one of embodiments 67-89, wherein the peptide derived from the ACE2 receptor comprises an amino acid sequence that is at least 70%, 75%, 80%, 85%, 90%, 91%, 92%, 93%, 94%, 95%, 96%, 97%, 98%, 99%, 100% identical to SEQ ID NO: 1.

[0404] Embodiment 91. The system of any one of embodiments 67-90, wherein the one or more capture molecules derived from a spike glycoprotein of a coronavirus comprises at least a portion of a spike protein derived from Severe acute respiratory syndrome-associated coronavirus (SARS-CoV).

[0405] Embodiment 92. The system of any one of embodiments 67-91, wherein the SARS-CoV is SARS-CoV-2.

[0406] Embodiment 93. The system of any one of embodiments 67-92, wherein an infection in a human subject by the SARS-CoV-2 causes coronavirus disease of 2019 (COVID-19) in the human subject.

[0407] Embodiment 94. The system of any one of embodiments 67-93, wherein the at least a portion of the spike protein comprises a subunit 1 of the spike protein.

[0408] Embodiment 95. The system of any one of embodiments 67-94, wherein the at least a portion of the spike protein comprises a receptor binding domain (RBD) of the subunit 1 of the spike protein.

[0409] Embodiment 96. The system of any one of embodiments 67-95, wherein the at least a portion of the spike protein comprises an amino acid sequence that is at least 70%, 75%, 80%, 85%, 90%, 91%, 92%, 93%, 94%, 95%, 96%, 97%, 98%, 99%, 100% identical to SEQ ID NO: 2.

[0410] Embodiment 97. The system of any one of embodiments 67-96, wherein the at least a portion of the spike protein comprises an amino acid sequence that is at least 70%, 75%, 80%, 85%, 90%, 91%, 92%, 93%, 94%, 95%, 96%, 97%, 98%, 99%, 100% identical to SEQ ID NO: 3.

[0411] Embodiment 98. The system of any one of embodiments 67-97, wherein the at least a portion of the spike protein comprises an amino acid sequence that is at least 70%, 75%, 80%, 85%, 90%, 91%, 92%, 93%, 94%, 95%, 96%, 97%, 98%, 99%, 100% identical to SEQ ID NOS: 4-6, 11-12, 24, 47-48, 71-72, 95-96, or 115.

[0412] Embodiment 99. The system of any one of embodiments 67-98, wherein the complex between the peptide-conjugate and the one or more capture molecules on the surface is visible on the surface using color, reflectance, fluorescence, bioluminescence, or chemiluminescence.

[0413] Embodiment 100. The system of any one of embodiments 67-99, wherein system further comprises one or more capture molecules specific to one or more antibodies against the coronavirus. Embodiment 101. The system of any one of embodiments 67-100, wherein the one or more capture molecules specific to one or more antibodies against the coronavirus is labeled.

[0414] Embodiment 102. The system of any one of embodiments 67-101, wherein system further comprises a labeled secondary capture molecule specific to the one or more capture molecules specific to one or more antibodies against the coronavirus.

[0415] Embodiment 103. The system of any one of embodiments 67-102, wherein the one or more capture molecules specific to one or more antibodies against the coronavirus is an antibody or antigen-binding fragment.

[0416] Embodiment 104. The system of any one of embodiments 67-103, wherein the antibody or antigen-binding fragment is monoclonal. antibody or antigen-binding fragment is polyclonal.

[0417] Embodiment 105. The system of any one of embodiments 67-104, wherein system further comprises a housing at least partially enclosing the surface.

[0418] Embodiment 106. The system of any one of embodiments 67-105, wherein system further comprises a sample receptor configured to receive a biological sample from a subject.

[0419] Embodiment 107. The system of any one of embodiments 67-106, wherein the sample receptor is mechanically coupled to a housing at least partially enclosing the surface.

[0420] Embodiment 108. The system of any one of embodiments 67-107, wherein the biological sample comprises one or more antibodies specific to the peptide.

[0421] Embodiment 109. The system of any one of embodiments 67-108, wherein the biological sample does not consist of one or more antibodies specific to the peptide.

[0422] Embodiment 110. The system of any one of embodiments 67-109, wherein the one or more antibodies belong to one or more immunoglobulin classes comprising immunoglobulin M, immunoglobulin G, immunoglobulin A, immunoglobulin E, and immunoglobulin D.

[0423] Embodiment 111. The system of any one of embodiments 67-110, wherein the subject was, or is, exposed to the coronavirus.

[0424] Embodiment 112. The system of any one of embodiments 67-111, wherein exposure of the subject to the coronavirus is unknown.

[0425] Embodiment 113. The system of any one of embodiments 67-112, wherein the subject was administered a vaccine against the coronavirus.

[0426] Embodiment 114. The system of any one of embodiments 67-113, wherein the biological sample comprises blood, urine, saliva, or feces.

[0427] Embodiment 115. The system of any one of embodiments 67-114, wherein the blood is capillary blood.

[0428] Embodiment 116. The system of any one of embodiments 67-115, wherein system further comprises a transdermal puncture device configured to obtain the capillary blood from the subject.

[0429] Embodiment 117. The system of any one of embodiments 67-116, wherein the sample receptor comprises a filter to separate serum from the blood.

[0430] Embodiment 118. The system of any one of embodiments 67-117, wherein system further comprises a data store for storing data from the image that is captured by the imaging device.

[0431] Embodiment 119. The system of any one of embodiments 67-118, wherein the data store is a cloud-based or a web-based data store, or a local data store.

[0432] Embodiment 120. The system of any one of embodiments 67-119, wherein the data comprises one or more of geolocation of the imaging device, a result from the image captured by the imaging device, and external data.

[0433] Embodiment 121. The system of any one of embodiments 67-120, wherein external data is data from an external device selected from a diagnostic device, a prognostic device, or a health or fitness tracking device.

[0434] Embodiment 122. The system of any one of embodiments 67-121, wherein external data comprises body temperature, heart rate variability, resting heart rate, sleep quality, and sleep quantity.

[0435] Embodiment 123. The system of any one of embodiments 67-122, wherein system further comprises an external device selected from a diagnostic device, a prognostic device, or a health or fitness tracking device.

[0436] Embodiment 124. The system of any one of embodiments 67-123, wherein the imaging device is a personal electronic device.

[0437] Embodiment 125. The system of any one of embodiments 67-124, wherein the personal electronic device is a smart phone, tablet, body camera, web camera, or personal computer.

[0438] Embodiment 126. The system of any one of embodiments 67-125, wherein the personal electronic device comprises a web-based portal.

[0439] Embodiment 127. The system of any one of embodiments 67-126, wherein the web-based portal utilizes an application.

[0440] Embodiment 128. The system of any one of embodiments 67-127, wherein the application is configured to receive data comprising a result from the image captured by the personal electronic device, a geolocation of the personal electronic device, and external data from one or more external device.

[0441] Embodiment 129. The system of any one of embodiments 67-128, wherein the application comprises a data analytics module configured to analyze the result by: (a) determining whether the result is a positive result or a negative result, wherein a positive results indicates immunity and a negative results indicates a lack of immunity; (b) determining an absolute number of complexes between the peptide-conjugate and the ACE2 receptor on the surface; or (c) determining a level of binding between the peptide-conjugate and the ACE2, wherein a high level of binding indicates a low level of immunity, and a low level of binding indicates a high level of immunity.

[0442] Embodiment 130. The system of any one of embodiments 67-129, wherein the data analytics module is further configured to analyze the result by determining whether the result is a positive result or a negative result, wherein a positive result indicates a presence of an acute infection by the coronavirus, and a negative results indicates an absence of the acute infection by the coronavirus.

[0443] Embodiment 131. The system of any one of embodiments 67-130, wherein the positive or the negative result is relative to a threshold number of complexes between the peptide-conjugate and the ACE2 receptor on the surface.

[0444] Embodiment 132. The system of any one of embodiments 67-131, wherein the positive or the negative result is relative to a threshold number of complexes between the one or more capture molecules specific to the one or more antibodies against the coronavirus.

[0445] Embodiment 133. The system of any one of embodiments 67-132, wherein the threshold number is predetermined relative to an index a control.

[0446] Embodiment 134. The system of any one of embodiments 67-133, wherein the data analytics module is further configured to normalize the result by subtracting background noise.

[0447] Embodiment 135. The system of any one of embodiments 67-134, wherein the data analytics module is further configured to identify a geographical location comprised of subjects for which a positive result was determined to detect a presence of herd immunity to the coronavirus, or recommend further testing.

[0448] Embodiment 136. The system of any one of embodiments 67-135, wherein the data analytics module is further configured to identify a geographical location comprised of subjects for which a positive result was determined to identify regions of infection or re-infection, or to recommend further testing.

[0449] Embodiment 137. The system of any one of embodiments 67-136, wherein the data analytics module utilizes geofencing from coordinates of the personal electronic device to identify the geographical location.

[0450] Embodiment 138. The system of any one of embodiments 67-137, wherein the data analytics module utilizes a machine learning algorithm, artificial intelligence, or both.

[0451] Embodiment 139. Aspects disclosed herein provide a method of identifying adaptive immunity to a coronavirus in a subject, the method comprising: (a) obtaining a biological sample from the subject; (b) producing a mixture by introducing the biological sample with a detectable peptide derived from a spike glycoprotein of a coronavirus; (c) bringing the mixture into contact with one or more capture molecules derived from an angiotensin-converting enzyme 2 (ACE2) receptor; (d) detecting a number of binding complexes between the detectable peptide and the one or more capture molecules; (e) if the number of the binding complexes is low relative to an index or a control, then identifying the subject as being immune to an infection by the coronavirus; and (f) if the number of the binding complexes is high relative to an index or a control, then identifying the subject as not being immune to an infection by the coronavirus.

[0452] Embodiment 140. The method of embodiment 139, wherein steps (a)-(f) are performed at the point of need.

[0453] Embodiment 141. The method of any one of embodiments 139-140, wherein steps (a)-(f) are performed at the point of care.

[0454] Embodiment 142. The method of any one of embodiments 139-141, wherein the surface comprises a material selected from the group consisting of a metal, a plastic, glass, and a nitrocellulose membrane.

[0455] Embodiment 143. The method of any one of embodiments 139-142, wherein the surface is a passivated surface.

[0456] Embodiment 144. The method of any one of embodiments 139-143, wherein the passivated surface comprises a polymer layer comprising a molecule selected from the group consisting of polyethylene glycol (PEG), poly(vinyl alcohol) (PVA), poly(vinyl pyridine), poly(vinyl pyrrolidone) (PVP), poly(acrylic acid) (PAA), polyacrylamide, poly(N-isopropylacrylamide) (PNIPAM), poly(methyl methacrylate) (PMA), poly(2-hydroxylethyl methacrylate) (PHEMA), poly(oligo(ethylene glycol) methyl ether methacrylate) (POEGMA), polyglutamic acid (PGA), poly-lysine, poly-glucoside, streptavidin, and dextran.

[0457] Embodiment 145. The method of any one of embodiments 139-144, wherein the one or more capture molecules comprises two or more capture molecules.

[0458] Embodiment 146. The method of any one of embodiments 139-145, wherein the one or more capture molecules is coupled to the surface by a covalent bond, a linker, or a combination thereof.

[0459] Embodiment 147. The method of any one of embodiments 139-146, wherein the linker is a chemical linker, a peptide linker, or a combination thereof.

[0460] Embodiment 148. The method of any one of embodiments 139-147, wherein the one or more capture molecules is a fusion polypeptide.

[0461] Embodiment 149. The method of any one of embodiments 139-148, wherein the fusion polypeptide comprises at least a portion of a fragment crystallizable region (Fc) region of a monoclonal antibody.

[0462] Embodiment 150. The method of any one of embodiments 139-149, wherein the one or more capture molecules is bound by an antibody that is coupled to the surface.

[0463] Embodiment 151. The method of any one of embodiments 139-150, wherein the detectable peptide comprises a nanoparticle, a fluorescent dye, an enzymatic label, or a colorimetric label, or a combination thereof.

[0464] Embodiment 152. The method of any one of embodiments 139-151, wherein The method of any one of embodiments 139-192, wherein the nanoparticle comprises a material selected from the group consisting of a metal, agarose, acrylic, and plastic.

[0465] Embodiment 153. The method of any one of embodiments 139-152, wherein the nanoparticle is magnetic.

[0466] Embodiment 154. The method of any one of embodiments 139-153, wherein the nanoparticle is conjugated to the peptide by a linker comprising a chemical linker, a peptide linker, or a combination thereof.

[0467] Embodiment 155. The method of any one of embodiments 139-154, wherein the detectable peptide derived from the ACE2 receptor comprises an amino acid sequence that is at least 70%, 75%, 80%, 85%, 90%, 91%, 92%, 93%, 94%, 95%, 96%, 97%, 98%, 99%, 100% identical to SEQ ID NO: 1.

[0468] Embodiment 156. The method of any one of embodiments 139-155, wherein the one or more capture molecules derived from the spike glycoprotein of a coronavirus comprises at least a portion of a spike protein derived from Severe acute respiratory syndrome-associated coronavirus (SARS-CoV).

[0469] Embodiment 157. The method of any one of embodiments 139-156, wherein the SARS-CoV is SARS-CoV-2.

[0470] Embodiment 158. The method of any one of embodiments 139-157, wherein an infection in a human subject by the SARS-CoV-2 causes coronavirus disease of 2019 (COVID-19) in the human subject.

[0471] Embodiment 159. The method of any one of embodiments 139-158, wherein the at least a portion of the spike protein comprises a subunit 1 of the spike protein.

[0472] Embodiment 160. The method of any one of embodiments 139-159, wherein the at least a portion of the spike protein comprises a receptor binding domain (RBD) of the subunit 1 of the spike protein.

[0473] Embodiment 161. The method of any one of embodiments 139-160, wherein the at least a portion of the spike protein comprises an amino acid sequence that is at least 70%, 75%, 80%, 85%, 90%, 91%, 92%, 93%, 94%, 95%, 96%, 97%, 98%, 99%, 100% identical to SEQ ID NO: 2.

[0474] Embodiment 162. The method of any one of embodiments 139-161, wherein the at least a portion of the spike protein comprises an amino acid sequence that is at least 70%, 75%, 80%, 85%, 90%, 91%, 92%, 93%, 94%, 95%, 96%, 97%, 98%, 99%, 100% identical to SEQ ID NO: 3.

[0475] Embodiment 163. The method of any one of embodiments 139-162, wherein the at least a portion of the spike protein comprises an amino acid sequence that is at least 70%, 75%, 80%, 85%, 90%, 91%, 92%, 93%, 94%, 95%, 96%, 97%, 98%, 99%, 100% identical to any one of SEQ ID NOS: 4-6, 11-12, 24, 47-48, 71-72, 95-96, or 115.

[0476] Embodiment 164. The method of any one of embodiments 139-163, wherein the complex between the peptide-conjugate and the one or more capture molecules is visible on the surface using color, reflectance, fluorescence, bioluminescence, or chemiluminescence.

[0477] Embodiment 165. The method of any one of embodiments 139-164, wherein the one or more capture molecules derived from the ACE2 receptor comprises an amino acid sequence that is at least 70%, 75%, 80%, 85%, 90%, 91%, 92%, 93%, 94%, 95%, 96%, 97%, 98%, 99%, 100% identical to SEQ ID NO: 1.

[0478] Embodiment 166. The method of any one of embodiments 139-165, wherein the detectable peptide derived from the spike glycoprotein of a coronavirus comprises at least a portion of a spike protein derived from Severe acute respiratory syndrome-associated coronavirus (SARS-CoV).

[0479] Embodiment 167. The method of any one of embodiments 139-166, wherein the SARS-CoV is SARS-CoV-2.

[0480] Embodiment 168. The method of any one of embodiments 139-167, wherein an infection in a human subject by the SARS-CoV-2 causes coronavirus disease of 2019 (COVID-19) in the human subject.

[0481] Embodiment 169. The method of any one of embodiments 139-168, wherein the at least a portion of the spike protein comprises a subunit 1 of the spike protein.

[0482] Embodiment 170. The method of any one of embodiments 139-169, wherein the at least a portion of the spike protein comprises a receptor binding domain (RBD) of the subunit 1 of the spike protein.

[0483] Embodiment 171. The method of any one of embodiments 139-170, wherein the at least a portion of the spike protein comprises an amino acid sequence that is at least 70%, 75%, 80%, 85%, 90%, 91%, 92%, 93%, 94%, 95%, 96%, 97%, 98%, 99%, 100% identical to SEQ ID NO: 2.

[0484] Embodiment 172. The method of any one of embodiments 139-171, wherein the at least a portion of the spike protein comprises an amino acid sequence that is at least 70%, 75%, 80%, 85%, 90%, 91%, 92%, 93%, 94%, 95%, 96%, 97%, 98%, 99%, 100% identical to SEQ ID NO: 3.

[0485] Embodiment 173. The method of any one of embodiments 139-172, wherein the at least a portion of the spike protein comprises an amino acid sequence that is at least 70%, 75%, 80%, 85%, 90%, 91%, 92%, 93%, 94%, 95%, 96%, 97%, 98%, 99%, 100% identical to any one of SEQ ID NOS: 4-6, 11-12, 24, 47-48, 71-72, 95-96, or 115.

[0486] Embodiment 174. The method of any one of embodiments 139-173, wherein the complex between the peptide-conjugate and the one or more capture molecules is visible on the surface using color, reflectance, fluorescence, bioluminescence, or chemiluminescence.

[0487] Embodiment 175. The method of any one of embodiments 139-174, wherein method further comprises providing a web-based portal on the personal electronic device.

[0488] Embodiment 176. The method of any one of embodiments 139-175, wherein method further comprises providing an application on the web-based portal.

[0489] Embodiment 177. The method of any one of embodiments 139-176, wherein method further comprises receiving data, by the application, the data comprising a result from the image captured by the personal electronic device, a geolocation of the personal electronic device, or external data from one or more external devices.

[0490] Embodiment 178. The method of any one of embodiments 139-177, wherein method further comprises providing a data analytics module at the application.

[0491] Embodiment 179. The method of any one of embodiments 139-178, wherein method further comprises analyzing the result, by the data analytics module, to determining whether the result is a positive result or a negative result, wherein a positive results indicates immunity and a negative results indicates a lack of immunity.

[0492] Embodiment 180. The method of any one of embodiments 139-179, wherein the positive or the negative result is relative to a threshold number of complexes between the detectable peptide and the one or more capture molecules on the surface.

[0493] Embodiment 181. The method of any one of embodiments 139-180, wherein the threshold number is predetermined relative to an index a control.

[0494] Embodiment 182. The method of any one of embodiments 139-181, wherein method further comprises analyzing the result, by the data analytics module, to determining an absolute number of complexes between the detectable peptide and the one or more capture molecules on the surface.

[0495] Embodiment 183. The method of any one of embodiments 139-182, wherein method further comprises analyzing the result, by the data analytics module, to determine a level of binding between the peptide-conjugate and the ACE2, wherein a high level of binding indicates a low level of immunity, and a low level of binding indicates a high level of immunity.

[0496] Embodiment 184. The method of any one of embodiments 139-183, wherein method further comprises normalizing, by the data analytics module, the result by subtracting background noise.

[0497] Embodiment 185. The method of any one of embodiments 139-184, wherein method further comprises identifying, by the data analytics module, a geographical location comprised of subjects for which a positive result was determined to detect a presence of herd immunity to the coronavirus, or recommend further testing.

[0498] Embodiment 186. The method of any one of embodiments 139-185, wherein identifying the geographical location comprises utilizing geofencing from coordinates of the personal electronic device.

[0499] Embodiment 187. The method of any one of embodiments 139-186, wherein the data analytics module utilizes a machine learning algorithm, artificial intelligence, or both.

[0500] Embodiment 188. The method of any one of embodiments 139-187, wherein method further comprises providing a data store that is a cloud-based data store or a web-based data store, or a local data store.

[0501] Embodiment 189. The method of any one of embodiments 139-188, wherein the data comprises one or more of geolocation of the imaging device, a result from the image captured by the imaging device, and external data.

[0502] Embodiment 190. The method of any one of embodiments 139-189, wherein external data is data from an external device selected from a diagnostic device, a prognostic device, or a health or fitness tracking device.

[0503] Embodiment 191. The method of any one of embodiments 139-190, wherein external data comprises body temperature, heart rate variability, resting heart rate, sleep quality, and sleep quantity.

[0504] Embodiment 192. The method of any one of embodiments 139-191, wherein comprising receiving, from an external device, the external data, wherein the external device is selected from a diagnostic device, a prognostic device, or a health or fitness tracking device.

[0505] Embodiment 193. Aspects disclosed herein provide a method of identifying adaptive immunity to a coronavirus in a subject, the method comprising: (a) obtaining a biological sample from the subject; (b) producing a mixture by introducing the biological sample with a detectable peptide derived from an angiotensin-converting enzyme 2 (ACE2) receptor; (c) bringing the mixture into contact with one or more capture molecules derived from a spike glycoprotein of a coronavirus; (d) detecting a number of binding complexes between the detectable peptide and the one or more capture molecules; (e) if the number of the binding complexes is low relative to an index or a control, then identifying the subject as being immune to an infection by the coronavirus; and (f) if the number of the binding complexes is high relative to an index or a control, then identifying the subject as not being immune to an infection by the coronavirus.

[0506] Embodiment 194. The method of embodiment 193, wherein steps (a)-(f) are performed at the point of need.

[0507] Embodiment 195. The method of any one of embodiments 193-194, wherein steps (a)-(f) are performed at the point of care.

[0508] Embodiment 196. The method of any one of embodiments 193-195, wherein the surface comprises a material selected from the group consisting of a metal, a plastic, glass, and a nitrocellulose membrane.

[0509] Embodiment 197. The method of any one of embodiments 193-196, wherein the surface is a passivated surface.

[0510] Embodiment 198. The method of any one of embodiments 193-197, wherein the passivated surface comprises a polymer layer comprising a molecule selected from the group consisting of polyethylene glycol (PEG), poly(vinyl alcohol) (PVA), poly(vinyl pyridine), poly(vinyl pyrrolidone) (PVP), poly(acrylic acid) (PAA), polyacrylamide, poly(N-isopropylacrylamide) (PNIPAM), poly(methyl methacrylate) (PMA), poly(2-hydroxylethyl methacrylate) (PHEMA), poly(oligo(ethylene glycol) methyl ether methacrylate) (POEGMA), polyglutamic acid (PGA), poly-lysine, poly-glucoside, streptavidin, and dextran.

[0511] Embodiment 199. The method of any one of embodiments 193-198, wherein the one or more capture molecules comprises two or more capture molecules.

[0512] Embodiment 200. The method of any one of embodiments 193-199, wherein the one or more capture molecules is coupled to the surface by a covalent bond, a linker, or a combination thereof.

[0513] Embodiment 201. The method of any one of embodiments 193-200, wherein the linker is a chemical linker, a peptide linker, or a combination thereof.

[0514] Embodiment 202. The method of any one of embodiments 193-201, wherein the one or more capture molecules is a fusion polypeptide.

[0515] Embodiment 203. The method of any one of embodiments 193-202, wherein the fusion polypeptide comprises at least a portion of a fragment crystallizable region (Fc) region of a monoclonal antibody.

[0516] Embodiment 204. The method of any one of embodiments 193-203, wherein the one or more capture molecules is bound by an antibody that is coupled to the surface.

[0517] Embodiment 205. The method of any one of embodiments 193-204, wherein the detectable peptide comprises a nanoparticle, a fluorescent dye, an enzymatic label, or a colorimetric label, or a combination thereof.

[0518] Embodiment 206. The method of any one of embodiments 193-205, wherein the nanoparticle comprises a material selected from the group consisting of a metal, agarose, acrylic, and plastic.

[0519] Embodiment 207. The method of any one of embodiments 193-206, wherein the nanoparticle is magnetic.

[0520] Embodiment 208. The method of any one of embodiments 193-207, wherein the nanoparticle is conjugated to the peptide by a linker comprising a chemical linker, a peptide linker, or a combination thereof.

[0521] Embodiment 209. The method of any one of embodiments 193-208, wherein the detectable peptide derived from the ACE2 receptor comprises an amino acid sequence that is at least 70%, 75%, 80%, 85%, 90%, 91%, 92%, 93%, 94%, 95%, 96%, 97%, 98%, 99%, 100% identical to SEQ ID NO: 1.

[0522] Embodiment 210. The method of any one of embodiments 193-209, wherein the one or more capture molecules derived from the spike glycoprotein of a coronavirus comprises at least a portion of a spike protein derived from Severe acute respiratory syndrome-associated coronavirus (SARS-CoV).

[0523] Embodiment 211. The method of any one of embodiments 193-210, wherein the SARS-CoV is SARS-CoV-2.

[0524] Embodiment 212. The method of any one of embodiments 193-211, wherein an infection in a human subject by the SARS-CoV-2 causes coronavirus disease of 2019 (COVID-19) in the human subject.

[0525] Embodiment 213. The method of any one of embodiments 193-212, wherein the at least a portion of the spike protein comprises a subunit 1 of the spike protein.

[0526] Embodiment 214. The method of any one of embodiments 193-213, wherein the at least a portion of the spike protein comprises a receptor binding domain (RBD) of the subunit 1 of the spike protein.

[0527] Embodiment 215. The method of any one of embodiments 193-214, wherein the at least a portion of the spike protein comprises an amino acid sequence that is at least 70%, 75%, 80%, 85%, 90%, 91%, 92%, 93%, 94%, 95%, 96%, 97%, 98%, 99%, 100% identical to SEQ ID NO: 2.

[0528] Embodiment 216. The method of any one of embodiments 193-215, wherein the at least a portion of the spike protein comprises an amino acid sequence that is at least 70%, 75%, 80%, 85%, 90%, 91%, 92%, 93%, 94%, 95%, 96%, 97%, 98%, 99%, 100% identical to SEQ ID NO: 3.

[0529] Embodiment 217. The method of any one of embodiments 193-216, wherein the at least a portion of the spike protein comprises an amino acid sequence that is at least 70%, 75%, 80%, 85%, 90%, 91%, 92%, 93%, 94%, 95%, 96%, 97%, 98%, 99%, 100% identical to any one of SEQ ID NOS: 4-6, 11-12, 24, 47-48, 71-72, 95-96, or 115.

[0530] Embodiment 218. The method of any one of embodiments 193-217, wherein the complex between the peptide-conjugate and the one or more capture molecules is visible on the surface using color, reflectance, fluorescence, bioluminescence, or chemiluminescence.

[0531] Embodiment 219. The method of any one of embodiments 193-218, wherein the biological sample comprises one or more antibodies specific to the peptide.

[0532] Embodiment 220. The method of any one of embodiments 193-219, wherein the biological sample does not consist of one or more antibodies specific to the peptide.

[0533] Embodiment 221. The method of any one of embodiments 193-220, wherein the one or more antibodies belong to one or more immunoglobulin classes comprising immunoglobulin M, immunoglobulin G, immunoglobulin A, immunoglobulin E, and immunoglobulin D.

[0534] Embodiment 222. The method of any one of embodiments 193-221, wherein the subject was, or is, exposed to the coronavirus.

[0535] Embodiment 223. The method of any one of embodiments 193-222, wherein exposure of the subject to the coronavirus is unknown.

[0536] Embodiment 224. The method of any one of embodiments 193-223, wherein the subject is a plurality of subjects.

[0537] Embodiment 225. The method of any one of embodiments 193-224, wherein method further comprises identifying adaptive immunity of the plurality of subjects to the coronavirus.

[0538] Embodiment 226. The method of any one of embodiments 193-225, wherein method further comprises monitoring a spread of infection of the plurality of subjects by the coronavirus.

[0539] Embodiment 227. The method of any one of embodiments 193-226, wherein the subject was administered a vaccine against the coronavirus.

[0540] Embodiment 228. The method of any one of embodiments 193-227, wherein method further comprises determining that the vaccine is effective to substantially immunize the subject against the coronavirus, provided the number of the binding complexes is low relative to an index or a control.

[0541] Embodiment 229. The method of any one of embodiments 193-228, wherein the biological sample comprises blood, urine, saliva, or feces.

[0542] Embodiment 230. The method of any one of embodiments 193-229, wherein the blood is capillary blood.

[0543] Embodiment 231. The method of any one of embodiments 193-230, wherein the capillary blood is obtained from the subject by a prick of the subject's finger.

[0544] Embodiment 232. The method of any one of embodiments 193-231, wherein method further comprises separating serum from the blood in the biological sample.

[0545] Embodiment 233. The method of any one of embodiments 193-232, wherein detecting in (d) comprises capturing an image of the surface with an imaging device to detect a number of binding complexes between the detectable peptide and the one or more capture molecules.

[0546] Embodiment 234. The method of any one of embodiments 193-233, wherein the imaging device is a personal electronic device.

[0547] Embodiment 235. The method of any one of embodiments 193-234, wherein the personal electronic device is a smart phone, tablet, body camera, web camera, or personal computer.

[0548] Embodiment 236. The method of any one of embodiments 193-235, wherein method further comprises providing a web-based portal on the personal electronic device.

[0549] Embodiment 237. The method of any one of embodiments 193-236, wherein method further comprises providing an application on the web-based portal.

[0550] Embodiment 238. The method of any one of embodiments 193-237, wherein method further comprises receiving data, by the application, the data comprising a result from the image captured by the personal electronic device, a geolocation of the personal electronic device, or external data from one or more external devices.

[0551] Embodiment 239. The method of any one of embodiments 193-238, wherein method further comprises providing a data analytics module at the application.

[0552] Embodiment 240. The method of any one of embodiments 193-239, wherein method further comprises analyzing the result, by the data analytics module, to determining whether the result is a positive result or a negative result, wherein a positive results indicates immunity and a negative results indicates a lack of immunity.

[0553] Embodiment 241. The method of any one of embodiments 193-240, wherein the positive or the negative result is relative to a threshold number of complexes between the detectable peptide and the one or more capture molecules on the surface.

[0554] Embodiment 242. The method of any one of embodiments 193-241, wherein the threshold number is predetermined relative to an index a control.

[0555] Embodiment 243. The method of any one of embodiments 193-242, wherein method further comprises analyzing the result, by the data analytics module, to determining an absolute number of complexes between the detectable peptide and the one or more capture molecules on the surface.

[0556] Embodiment 244. The method of any one of embodiments 193-243, wherein method further comprises analyzing the result, by the data analytics module, to determine a level of binding between the peptide-conjugate and the ACE2, wherein a high level of binding indicates a low level of immunity, and a low level of binding indicates a high level of immunity.

[0557] Embodiment 245. The method of any one of embodiments 193-244, wherein method further comprises normalizing, by the data analytics module, the result by subtracting background noise.

[0558] Embodiment 246. The method of any one of embodiments 193-245, wherein method further comprises identifying, by the data analytics module, a geographical location comprised of subjects for which a positive result was determined to detect a presence of herd immunity to the coronavirus, or recommend further testing.

[0559] Embodiment 247. The method of any one of embodiments 193-246, wherein identifying the geographical location comprises utilizing geofencing from coordinates of the personal electronic device.

[0560] Embodiment 248. The method of any one of embodiments 193-247, wherein the data analytics module utilizes a machine learning algorithm, artificial intelligence, or both.

[0561] Embodiment 249. The method of any one of embodiments 193-248, wherein method comprises further comprise providing a data store that is a cloud-based data store or a web-based data store, or a local data store.

[0562] Embodiment 250. The method of any one of embodiments 193-249, wherein the data comprises one or more of geolocation of the imaging device, a result from the image captured by the imaging device, and external data.

[0563] Embodiment 251. The method of any one of embodiments 193-250, wherein external data is data from an external device selected from a diagnostic device, a prognostic device, or a health or fitness tracking device.

[0564] Embodiment 252. The method of any one of embodiments 193-251, wherein external data comprises body temperature, heart rate variability, resting heart rate, sleep quality, and sleep quantity.

[0565] Embodiment 253. The method of any one of embodiments 193-252, wherein comprising receiving, from an external device, the external data, wherein the external device is selected from a diagnostic device, a prognostic device, or a health or fitness tracking device.

[0566] Embodiment 254. Aspects disclosed herein provide a method comprising: (a) obtaining a biological sample from the subject; (b) determining whether the subject has an acute infection by a pathogen by: (i) introducing the biological sample to a mixture comprising one or more capture molecules specific to an antibody against the pathogen; (ii) detecting a number of binding complexes between the one or more capture molecules specific to the antibody against the pathogen, wherein if the number of the binding complexes is high relative to an index or a control, then identifying the subject as having the acute infection by the coronavirus; or (c) determining whether the subject has a sufficient adaptive immunity against the pathogen by: (i) introducing the biological sample with a second mixture comprising detectable peptide; (ii) bringing the second mixture into contact with one or more capture molecules specific to the detectable peptide; (iii) detecting a number of binding complexes between the detectable peptide and the one or more capture molecules specific to the peptide, wherein if the number of the binding complexes is low, then identifying the subject as being immune to an infection by the coronavirus.

[0567] Embodiment 255. The method of embodiment 254, wherein if the number of the binding complexes is high relative to an index or a control, then identifying the subject as not being immune to an infection by the coronavirus.

[0568] Embodiment 256. The method of any one of embodiments 254-255, wherein the first mixture and the second mixture is a single mixture.

[0569] Embodiment 257. The method of any one of embodiments 254-256, wherein the one or more capture molecules comprises two or more capture molecules.

[0570] Embodiment 258. The method of any one of embodiments 254-257, wherein the one or more capture molecules comprises a first antibody, a second antibody or a third antibody, wherein the first antibody is specific to an immunoglobulin G antibody against SARS-CoV-2, the second antibody is specific to an immunoglobulin M antibody against SARS-CoV-2, and the third antibody is specific to an immunoglobulin A of the SARS-CoV-2.

[0571] Embodiment 259. The method of any one of embodiments 254-258, wherein steps (a)-(c) are performed at the point of need.

[0572] Embodiment 260. The method of any one of embodiments 254-259, wherein steps (a)-(c) are performed at the point of care.

[0573] Embodiment 261. The method of any one of embodiments 254-260, wherein the one or more capture molecules specific to the antibody against the pathogen are coupled to a surface.

[0574] Embodiment 262. The method of any one of embodiments 254-261, wherein the one or more capture molecules specific to the labeled peptide are coupled to the surface.

[0575] Embodiment 263. The method of any one of embodiments 254-262, wherein the surface comprises a material selected from the group consisting of a metal, a plastic, glass, and a nitrocellulose membrane.

[0576] Embodiment 264. The method of any one of embodiments 254-263, wherein the surface is a passivated surface.

[0577] Embodiment 265. The method of any one of embodiments 254-264, wherein the passivated surface comprises a polymer layer comprising a molecule selected from the group consisting of polyethylene glycol (PEG), poly(vinyl alcohol) (PVA), poly(vinyl pyridine), poly(vinyl pyrrolidone) (PVP), poly(acrylic acid) (PAA), polyacrylamide, poly(N-isopropylacrylamide) (PNIPAM), poly(methyl methacrylate) (PMA), poly(2-hydroxylethyl methacrylate) (PHEMA), poly(oligo(ethylene glycol) methyl ether methacrylate) (POEGMA), polyglutamic acid (PGA), poly-lysine, poly-glucoside, streptavidin, and dextran.

[0578] Embodiment 266. The method of any one of embodiments 254-265, wherein the one or more capture molecules is coupled to the surface by a covalent bond, a linker, or a combination thereof.

[0579] Embodiment 267. The method of any one of embodiments 254-266, wherein the linker is a chemical linker, a peptide linker, or a combination thereof.

[0580] Embodiment 268. The method of any one of embodiments 254-267, wherein the one or more capture molecules is a fusion polypeptide.

[0581] Embodiment 269. The method of any one of embodiments 254-268, wherein the fusion polypeptide comprises at least a portion of a fragment crystallizable region (Fc) region of a monoclonal antibody.

[0582] Embodiment 270. The method of any one of embodiments 254-269, wherein the one or more capture molecules is bound by an antibody that is coupled to the surface.

[0583] Embodiment 271. The method of any one of embodiments 254-270, wherein the detectable peptide comprises a nanoparticle, a fluorescent dye, an enzymatic label, or a colorimetric label, or a combination thereof.

[0584] Embodiment 272. The method of any one of embodiments 254-271, wherein the nanoparticle comprises a material selected from the group consisting of a metal, agarose, acrylic, and plastic.

[0585] Embodiment 273. The method of any one of embodiments 254-272, wherein the nanoparticle is magnetic.

[0586] Embodiment 274. The method of any one of embodiments 254-273, wherein the nanoparticle is conjugated to the peptide by a linker comprising a chemical linker, a peptide linker, or a combination thereof.

[0587] Embodiment 275. The method of any one of embodiments 254-274, wherein the detectable peptide is derived from the ACE2 receptor and comprises an amino acid sequence that is at least 70%, 75%, 80%, 85%, 90%, 91%, 92%, 93%, 94%, 95%, 96%, 97%, 98%, 99%, 100% identical to SEQ ID NO: 1.

[0588] Embodiment 276. The method of any one of embodiments 254-275, wherein the one or more capture molecules specific to the detectable peptide is derived from the spike glycoprotein of a coronavirus and comprises at least a portion of a spike protein derived from Severe acute respiratory syndrome-associated coronavirus (SARS-CoV).

[0589] Embodiment 277. The method of any one of embodiments 254-276, wherein the SARS-CoV is SARS-CoV-2.

[0590] Embodiment 278. The method of any one of embodiments 254-277, wherein an infection in a human subject by the SARS-CoV-2 causes coronavirus disease of 2019 (COVID-19) in the human subject.

[0591] Embodiment 279. The method of any one of embodiments 254-278, wherein the at least a portion of the spike protein comprises a subunit 1 of the spike protein.

[0592] Embodiment 280. The method of any one of embodiments 254-279, wherein the at least a portion of the spike protein comprises a receptor binding domain (RBD) of the subunit 1 of the spike protein.

[0593] Embodiment 281. The method of any one of embodiments 254-280, wherein the at least a portion of the spike protein comprises an amino acid sequence that is at least 70%, 75%, 80%, 85%, 90%, 91%, 92%, 93%, 94%, 95%, 96%, 97%, 98%, 99%, 100% identical to SEQ ID NO: 2.

[0594] Embodiment 282. The method of any one of embodiments 254-281, wherein the at least a portion of the spike protein comprises an amino acid sequence that is at least 70%, 75%, 80%, 85%, 90%, 91%, 92%, 93%, 94%, 95%, 96%, 97%, 98%, 99%, 100% identical to SEQ ID NO: 3.

[0595] Embodiment 283. The method of any one of embodiments 254-282, wherein the at least a portion of the spike protein comprises an amino acid sequence that is at least 70%, 75%, 80%, 85%, 90%, 91%, 92%, 93%, 94%, 95%, 96%, 97%, 98%, 99%, 100% identical to any one of SEQ ID NOS: 4-6, 11-12, 24, 47-48, 71-72, 95-96, or 115.

[0596] Embodiment 284. The method of any one of embodiments 254-283, wherein the complex between the peptide-conjugate and the one or more capture molecules is visible on the surface using color, reflectance, fluorescence, bioluminescence, or chemiluminescence.

[0597] Embodiment 285. The method of any one of embodiments 254-284, wherein the one or more capture molecules specific to the detectable peptide is derived from the ACE2 receptor and comprises an amino acid sequence that is at least 70%, 75%, 80%, 85%, 90%, 91%, 92%, 93%, 94%, 95%, 96%, 97%, 98%, 99%, 100% identical to SEQ ID NO: 1.

[0598] Embodiment 286. The method of any one of embodiments 254-285, wherein the detectable peptide is derived from the spike glycoprotein of a coronavirus and comprises at least a portion of a spike protein derived from Severe acute respiratory syndrome-associated coronavirus (SARS-CoV).

[0599] Embodiment 287. The method of any one of embodiments 254-286, wherein the SARS-CoV is SARS-CoV-2.

[0600] Embodiment 288. The method of any one of embodiments 254-287, wherein an infection in a human subject by the SARS-CoV-2 causes coronavirus disease of 2019 (COVID-19) in the human subject.

[0601] Embodiment 289. The method of any one of embodiments 254-288, wherein the at least a portion of the spike protein comprises a subunit 1 of the spike protein.

[0602] Embodiment 290. The method of any one of embodiments 254-289, wherein the at least a portion of the spike protein comprises a receptor binding domain (RBD) of the subunit 1 of the spike protein.

[0603] Embodiment 291. The method of any one of embodiments 254-290, wherein the at least a portion of the spike protein comprises an amino acid sequence that is at least 70%, 75%, 80%, 85%, 90%, 91%, 92%, 93%, 94%, 95%, 96%, 97%, 98%, 99%, 100% identical to SEQ ID NO: 2.

[0604] Embodiment 292. The method of any one of embodiments 254-291, wherein the at least a portion of the spike protein comprises an amino acid sequence that is at least 70%, 75%, 80%, 85%, 90%, 91%, 92%, 93%, 94%, 95%, 96%, 97%, 98%, 99%, 100% identical to SEQ ID NO: 3.

[0605] Embodiment 293. The method of any one of embodiments 254-292, wherein the at least a portion of the spike protein comprises an amino acid sequence that is at least 70%, 75%, 80%, 85%, 90%, 91%, 92%, 93%, 94%, 95%, 96%, 97%, 98%, 99%, 100% identical to any one of SEQ ID NOS: 4-6, 11-12, 24, 47-48, 71-72, 95-96, or 115.

[0606] Embodiment 294. The method of any one of embodiments 254-293, wherein the complex between the detectable peptide and the one or more capture molecules specific to the detectable peptide is visible on the surface using color, reflectance, fluorescence, bioluminescence, or chemiluminescence.

[0607] Embodiment 295. The method of any one of embodiments 254-294, wherein the biological sample comprises one or more antibodies specific to the peptide.

[0608] Embodiment 296. The method of any one of embodiments 254-295, wherein the biological sample does not consist of one or more antibodies specific to the peptide.

[0609] Embodiment 297. The method of any one of embodiments 254-2%, wherein the one or more antibodies belong to one or more immunoglobulin classes comprising immunoglobulin M, immunoglobulin G, immunoglobulin A, immunoglobulin E, and immunoglobulin D.

[0610] Embodiment 298. The method of any one of embodiments 254-297, wherein pathogen is a coronavirus.

[0611] Embodiment 299. The method of any one of embodiments 254-298, wherein the subject was, or is, exposed to the coronavirus.

[0612] Embodiment 300. The method of any one of embodiments 254-299, wherein exposure of the subject to the coronavirus is unknown.

[0613] Embodiment 301. The method of any one of embodiments 254-300, wherein the subject is a plurality of subjects.

[0614] Embodiment 302. The method of any one of embodiments 254-301, wherein method further comprises identifying adaptive immunity of the plurality of subjects to the coronavirus.

[0615] Embodiment 303. The method of any one of embodiments 254-302, wherein method further comprises monitoring a spread of infection of the plurality of subjects by the coronavirus.

[0616] Embodiment 304. The method of any one of embodiments 254-303, wherein the subject was administered a vaccine against the coronavirus.

[0617] Embodiment 305. The method of any one of embodiments 254-304, wherein method further comprises determining that the vaccine is effective to substantially immunize the subject against the coronavirus, provided the number of the binding complexes between the detectable peptide and the one or more capture molecules specific to the detectable peptide is low relative to an index or a control.

[0618] Embodiment 306. The method of any one of embodiments 254-305, wherein the biological sample comprises blood, urine, saliva, or feces.

[0619] Embodiment 307. The method of any one of embodiments 254-306, wherein the blood is capillary blood.

[0620] Embodiment 308. The method of any one of embodiments 254-307, wherein the capillary blood is obtained from the subject by a prick of the subject's finger.

[0621] Embodiment 309. The method of any one of embodiments 254-308, wherein method further comprises separating serum from the blood in the biological sample.

[0622] Embodiment 310. The method of any one of embodiments 254-309, wherein detecting in (d) comprises capturing an image of the surface with an imaging device to detect a number of binding complexes between the detectable peptide and the one or more capture molecules.

[0623] Embodiment 311. The method of any one of embodiments 254-310, wherein the imaging device is a personal electronic device.

[0624] Embodiment 312. The method of any one of embodiments 254-311, wherein the personal electronic device is a smart phone, tablet, body camera, web camera, or personal computer.

[0625] Embodiment 313. The method of any one of embodiments 254-312, wherein method further comprises providing a web-based portal on the personal electronic device.

[0626] Embodiment 314. The method of any one of embodiments 254-313, wherein method further comprises providing an application on the web-based portal.

[0627] Embodiment 315. The method of any one of embodiments 254-314, wherein method further comprises receiving data, by the application, the data comprising a result from the image captured by the personal electronic device, a geolocation of the personal electronic device, or external data from one or more external devices.

[0628] Embodiment 316. The method of any one of embodiments 254-315, wherein method further comprises providing a data analytics module at the application.

[0629] Embodiment 317. The method of any one of embodiments 254-316 wherein method further comprises analyzing the result, by the data analytics module, to determining whether the result is a positive result or a negative result, wherein a positive results indicates immunity and a negative results indicates a lack of immunity.

[0630] Embodiment 318. The method of any one of embodiments 254-317, wherein the positive or the negative result (e.g., immune or not immune) is relative to a threshold number of complexes between the detectable peptide and the one or more capture molecules.

[0631] Embodiment 319. The method of any one of embodiments 254-318, wherein the threshold number is predetermined relative to an index a control.

[0632] Embodiment 320. The method of any one of embodiments 254-319, wherein the positive or the negative result (e.g., acute infection present or not present) is relative to a threshold number of complexes between the one or more capture molecules specific to the antibody against the pathogen and the antibody against the pathogen.

[0633] Embodiment 321. The method of any one of embodiments 254-320, wherein method further comprises analyzing the result, by the data analytics module, to determining an absolute number of complexes between the detectable peptide and the one or more capture molecules specific to the detectable peptide, or the antibody against the pathogen and the one or more capture molecules specific to the antibody.

[0634] Embodiment 322. The method of any one of embodiments 254-321, wherein method further comprises analyzing the result, by the data analytics module, to determine a level of binding between the detectable peptide and the one or more capture molecules specific to the detectable peptide, wherein a high level of binding indicates a low level of immunity, and a low level of binding indicates a high level of immunity.

[0635] Embodiment 323. The method of any one of embodiments 254-322, wherein method further comprises analyzing the result, by the data analytics module, to determine a level of binding between the one or more capture molecules specific to the antibody against the pathogen and the antibody against the pathogen, wherein a high level of binding indicates a presence of an acute infection by the pathogen.

[0636] Embodiment 324. The method of any one of embodiments 254-323, wherein method further comprises normalizing, by the data analytics module, the result by subtracting background noise.

[0637] Embodiment 325. The method of any one of embodiments 254-324, wherein method further comprises identifying, by the data analytics module, a geographical location comprised of subjects for which a positive result for immunity was determined to detect a presence of herd immunity to the pathogen, or recommend further testing.

[0638] Embodiment 326. The method of any one of embodiments 254-325, wherein method further comprises identifying, by the data analytics module, a geographical location comprised of subjects for which a positive result for an acute infection was determined to detect a presence of infectivity or re-infectivity by the pathogen, or recommend further testing.

[0639] Embodiment 327. The method of any one of embodiments 254-326, wherein identifying the geographical location comprises utilizing geofencing from coordinates of the personal electronic device.

[0640] Embodiment 328. The method of any one of embodiments 254-327, wherein the data analytics module utilizes a machine learning algorithm, artificial intelligence, or both.

[0641] Embodiment 329. The method of any one of embodiments 254-328, wherein method further comprises providing a data store that is a cloud-based data store or a web-based data store, or a local data store.

[0642] Embodiment 330. The method of any one of embodiments 254-329, wherein the data comprises one or more of geolocation of the imaging device, a result from the image captured by the imaging device, and external data.

[0643] Embodiment 331. The method of any one of embodiments 254-330, wherein external data is data from an external device selected from a diagnostic device, a prognostic device, or a health or fitness tracking device.

[0644] Embodiment 332. The method of any one of embodiments 254-331, wherein external data comprises body temperature, heart rate variability, resting heart rate, sleep quality, and sleep quantity.

[0645] Embodiment 333. The method of any one of embodiments 254-332, wherein comprising receiving, from an external device, the external data, wherein the external device is selected from a diagnostic device, a prognostic device, or a health or fitness tracking device.

[0646] Embodiment 334. Aspects disclosed herein provide a device comprising: (a) a liquid composition comprising a peptide-conjugate comprising: (i) a peptide derived from a spike glycoprotein of a coronavirus; and (ii) a detectable moiety; and (b) a surface submerged in the liquid composition, the surface comprising one or more capture molecules coupled to the surface, the one or more capture molecules derived from an angiotensin-converting enzyme 2 (ACE2) receptor.

[0647] Embodiment 335. The device of embodiment 334, wherein the surface is a surface of a container, wherein the container contains (a) and (b).

[0648] Embodiment 336. The device of any one of embodiments 334-335, wherein the device is portable.

[0649] Embodiment 337. The device of any one of embodiments 334-336, wherein the device is a point of need device.

[0650] Embodiment 338. The device of any one of embodiments 334-337, wherein the point of need is a point of care.

[0651] Embodiment 339. The device of any one of embodiments 334-338, wherein the surface comprises a material selected from the group consisting of a metal, a plastic, glass, and a nitrocellulose membrane.

[0652] Embodiment 340. The device of any one of embodiments 334-339, wherein the surface is a passivated surface.

[0653] Embodiment 341. The device of any one of embodiments 334-340, wherein the passivated surface comprises a polymer layer comprising a molecule selected from the group consisting of polyethylene glycol (PEG), poly(vinyl alcohol) (PVA), poly(vinyl pyridine), poly(vinyl pyrrolidone) (PVP), poly(acrylic acid) (PAA), polyacrylamide, poly(N-isopropylacrylamide) (PNIPAM), poly(methyl methacrylate) (PMA), poly(2-hydroxylethyl methacrylate) (PHEMA), poly(oligo(ethylene glycol) methyl ether methacrylate) (POEGMA), polyglutamic acid (PGA), poly-lysine, poly-glucoside, streptavidin, and dextran.

[0654] Embodiment 342. The device of any one of embodiments 334-341, wherein the one or more capture molecules comprises two or more capture molecules.

[0655] Embodiment 343. The device of any one of embodiments 334-342, wherein the one or more capture molecules is coupled to the surface by a covalent bond, a linker, or a combination thereof.

[0656] Embodiment 344. The device of any one of embodiments 334-343, wherein the linker is a chemical linker, a peptide linker, or a combination thereof.

[0657] Embodiment 345. The device of any one of embodiments 334-344, wherein the one or more capture molecules is a fusion polypeptide.

[0658] Embodiment 346. The device of any one of embodiments 334-345, wherein the fusion polypeptide comprises at least a portion of a fragment crystallizable region (Fc) region of a monoclonal antibody.

[0659] Embodiment 347. The device of any one of embodiments 334-346, wherein the one or more capture molecules is bound by an antibody that is coupled to the surface.

[0660] Embodiment 348. The device of any one of embodiments 334-347, wherein the peptide-conjugate comprises a nanoparticle, a fluorescent dye, an enzymatic label, or a colorimetric label, or a combination thereof.

[0661] Embodiment 349. The device of any one of embodiments 334-348, wherein the nanoparticle comprises a material selected from the group consisting of a metal, agarose, acrylic, and plastic.

[0662] Embodiment 350. The device of any one of embodiments 334-349, wherein the nanoparticle is magnetic.

[0663] Embodiment 351. The device of any one of embodiments 334-350, wherein the nanoparticle is conjugated to the peptide by a linker comprising a chemical linker, a peptide linker, or a combination thereof.

[0664] Embodiment 352. The device of any one of embodiments 334-3514, wherein the one or more capture molecules derived from the ACE2 receptor comprises an amino acid sequence that is at least 70%, 75%, 80%, 85%, 90%, 91%, 92%, 93%, 94%, 95%, 96%, 97%, 98%, 99%, 100% identical to SEQ ID NO: 1.

[0665] Embodiment 353. The device of any one of embodiments 334-352, wherein the peptide derived from the spike glycoprotein of a coronavirus comprises at least a portion of a spike protein derived from Severe acute respiratory syndrome-associated coronavirus (SARS-CoV).

[0666] Embodiment 354. The device of any one of embodiments 334-353, wherein the SARS-CoV is SARS-CoV-2.

[0667] Embodiment 355. The device of any one of embodiments 334-354, wherein an infection in a human subject by the SARS-CoV-2 causes coronavirus disease of 2019 (COVID-19) in the human subject.

[0668] Embodiment 356. The device of any one of embodiments 334-355, wherein the at least a portion of the spike protein comprises a subunit 1 of the spike protein.

[0669] Embodiment 357. The device of any one of embodiments 334-356, wherein the at least a portion of the spike protein comprises a receptor binding domain (RBD) of the subunit 1 of the spike protein.

[0670] Embodiment 358. The device of any one of embodiments 334-357, wherein the at least a portion of the spike protein comprises an amino acid sequence that is at least 70%, 75%, 80%, 85%, 90%, 91%, 92%, 93%, 94%, 95%, 96%, 97%, 98%, 99%, 100% identical to SEQ ID NO: 2.

[0671] Embodiment 359. The device of any one of embodiments 334-358, wherein the at least a portion of the spike protein comprises an amino acid sequence that is at least 70%, 75%, 80%, 85%, 90%, 91%, 92%, 93%, 94%, 95%, 96%, 97%, 98%, 99%, 100% identical to SEQ ID NO: 3.

[0672] Embodiment 360. The device of any one of embodiments 334-359, wherein the at least a portion of the spike protein comprises an amino acid sequence that is at least 70%, 75%, 80%, 85%, 90%, 91%, 92%, 93%, 94%, 95%, 96%, 97%, 98%, 99%, 100% identical to any one of SEQ ID NOS: 4-6, 11-12, 24, 47-48, 71-72, 95-96, or 115.

[0673] Embodiment 361. The device of any one of embodiments 334-360, wherein the complex between the peptide-conjugate and the one or more capture molecules receptor on the surface is visible on the surface using color, reflectance, fluorescence, bioluminescence, or chemiluminescence.

[0674] Embodiment 362. The device of any one of embodiments 334-361, wherein the one or more capture molecules is specific to one or more antibodies against the coronavirus.

[0675] Embodiment 363. The device of any one of embodiments 334-362, wherein the one or more capture molecules specific to one or more antibodies against the coronavirus is labeled.

[0676] Embodiment 364. The device of any one of embodiments 334-363, wherein device further comprise a labeled secondary capture molecule specific to the one or more capture molecules specific to one or more antibodies against the coronavirus.

[0677] Embodiment 365. The device of any one of embodiments 334-364, wherein the one or more capture molecules specific to one or more antibodies against the coronavirus is an antibody or antigen-binding fragment.

[0678] Embodiment 366. The device of any one of embodiments 334-365, wherein the antibody or antigen-binding fragment is monoclonal. antibody or antigen-binding fragment is polyclonal.

[0679] Embodiment 367. The device of any one of embodiments 334-366, wherein device further comprises a housing at least partially enclosing the surface.

[0680] Embodiment 368. The device of any one of embodiments 334-367, wherein device further comprises a sample receptor configured to receive a biological sample from a subject.

[0681] Embodiment 369. The device of any one of embodiments 334-368, wherein the sample receptor is mechanically coupled to a housing at least partially enclosing the surface.

[0682] Embodiment 370. The device of any one of embodiments 334-369, wherein the biological sample comprises one or more antibodies specific to the peptide.

[0683] Embodiment 371. The device of any one of embodiments 334-370, wherein the biological sample does not consist of one or more antibodies specific to the peptide.

[0684] Embodiment 372. The device of any one of embodiments 334-371, wherein the one or more antibodies belong to one or more immunoglobulin classes comprising immunoglobulin M, immunoglobulin G, immunoglobulin A, immunoglobulin E, and immunoglobulin D.

[0685] Embodiment 373. The device of any one of embodiments 334-372, wherein the subject was, or is, exposed to the coronavirus.

[0686] Embodiment 374. The device of any one of embodiments 334-373, wherein exposure of the subject to the coronavirus is unknown.

[0687] Embodiment 375. The device of any one of embodiments 334-374, wherein the subject was administered a vaccine against the coronavirus.

[0688] Embodiment 376. The device of any one of embodiments 334-375, wherein the biological sample comprises blood, urine, saliva, or feces.

[0689] Embodiment 377. The device of any one of embodiments 334-376, wherein the blood is capillary blood.

[0690] Embodiment 378. The device of any one of embodiments 334-377, wherein device further comprises a transdermal puncture device configured to obtain the capillary blood from the subject.

[0691] Embodiment 379. The device of any one of embodiments 334-378, wherein the sample receptor comprises a filter to separate serum from the blood.

[0692] Embodiment 380. The device of any one of embodiments 334-379, wherein the device is a single integrated device.

[0693] Embodiment 381. Aspects disclosed herein provide a device comprising: (a) a liquid composition comprising a peptide-conjugate comprising: (i) a peptide derived from an angiotensin-converting enzyme 2 (ACE2) receptor; and (ii) a detectable moiety; and (b) a surface submerged in the liquid composition, the surface comprising one or more capture molecules coupled to the surface, the one or more capture molecules derived from a spike glycoprotein of a coronavirus.

[0694] Embodiment 382. The device of embodiment 381, wherein the surface is a surface of a container, wherein the container contains (a) and (b).

[0695] Embodiment 383. The device of any one of embodiments 381-382, wherein the device is portable.

[0696] Embodiment 384. The device of any one of embodiments 381-383, wherein the device is a point of need device.

[0697] Embodiment 385. The device of any one of embodiments 381-384, wherein the point of need is a point of care.

[0698] Embodiment 386. The device of any one of embodiments 381-385, wherein the surface comprises a material selected from the group consisting of a metal, a plastic, glass, and a nitrocellulose membrane.

[0699] Embodiment 387. The device of any one of embodiments 381-386, wherein the surface is a passivated surface.

[0700] Embodiment 388. The device of any one of embodiments 381-387, wherein the passivated surface comprises a polymer layer comprising a molecule selected from the group consisting of polyethylene glycol (PEG), poly(vinyl alcohol) (PVA), poly(vinyl pyridine), poly(vinyl pyrrolidone) (PVP), poly(acrylic acid) (PAA), polyacrylamide, poly(N-isopropylacrylamide) (PNIPAM), poly(methyl methacrylate) (PMA), poly(2-hydroxylethyl methacrylate) (PHEMA), poly(oligo(ethylene glycol) methyl ether methacrylate) (POEGMA), polyglutamic acid (PGA), poly-lysine, poly-glucoside, streptavidin, and dextran.

[0701] Embodiment 389. The device of any one of embodiments 381-388, wherein the one or more capture molecules comprises two or more capture molecules.

[0702] Embodiment 390. The device of any one of embodiments 381-389, wherein the one or more capture molecules is coupled to the surface by a covalent bond, a linker, or a combination thereof.

[0703] Embodiment 391. The device of any one of embodiments 381-390, wherein the linker is a chemical linker, a peptide linker, or a combination thereof.

[0704] Embodiment 392. The device of any one of embodiments 381-391, wherein the one or more capture molecules is a fusion polypeptide.

[0705] Embodiment 393. The device of any one of embodiments 381-392, wherein the fusion polypeptide comprises at least a portion of a fragment crystallizable region (Fc) region of a monoclonal antibody.

[0706] Embodiment 394. The device of any one of embodiments 381-393, wherein the one or more capture molecules is bound by an antibody that is coupled to the surface.

[0707] Embodiment 395. The device of any one of embodiments 381-394, wherein the peptide-conjugate comprises a nanoparticle, a fluorescent dye, an enzymatic label, or a colorimetric label, or a combination thereof.

[0708] Embodiment 3%. The device of any one of embodiments 381-395, wherein the nanoparticle comprises a material selected from the group consisting of a metal, agarose, acrylic, and plastic.

[0709] Embodiment 397. The device of any one of embodiments 381-3%, wherein the nanoparticle is magnetic.

[0710] Embodiment 398. The device of any one of embodiments 381-397, wherein the nanoparticle is conjugated to the peptide by a linker comprising a chemical linker, a peptide linker, or a combination thereof.

[0711] Embodiment 399. The device of any one of embodiments 381-398, wherein the peptide derived from the ACE2 receptor comprises an amino acid sequence that is at least 70%, 75%, 80%, 85%, 90%, 91%, 92%, 93%, 94%, 95%, %%, 97%, 98%, 99%, 100% identical to SEQ ID NO: 1.

[0712] Embodiment 400. The device of any one of embodiments 381-399, wherein the one or more capture molecules derived from the spike glycoprotein of a coronavirus comprises at least a portion of a spike protein derived from Severe acute respiratory syndrome-associated coronavirus (SARS-CoV).

[0713] Embodiment 401. The device of any one of embodiments 381-400, wherein the SARS-CoV is SARS-CoV-2.

[0714] Embodiment 402. The device of any one of embodiments 381-401, wherein an infection in a human subject by the SARS-CoV-2 causes coronavirus disease of 2019 (COVID-19) in the human subject.

[0715] Embodiment 403. The device of any one of embodiments 381-402, wherein the at least a portion of the spike protein comprises a subunit 1 of the spike protein.

[0716] Embodiment 404. The device of any one of embodiments 381-403, wherein the at least a portion of the spike protein comprises a receptor binding domain (RBD) of the subunit 1 of the spike protein.

[0717] Embodiment 405. The device of any one of embodiments 381-404, wherein the at least a portion of the spike protein comprises an amino acid sequence that is at least 70%, 75%, 80%, 85%, 90%, 91%, 92%, 93%, 94%, 95%, 96%, 97%, 98%, 99%, 100% identical to SEQ ID NO: 2.

[0718] Embodiment 406. The device of any one of embodiments 381-405, wherein the at least a portion of the spike protein comprises an amino acid sequence that is at least 70%, 75%, 80%, 85%, 90%, 91%, 92%, 93%, 94%, 95%, 96%, 97%, 98%, 99%, 100% identical to SEQ ID NO: 3.

[0719] Embodiment 407. The device of any one of embodiments 381-406, wherein the at least a portion of the spike protein comprises an amino acid sequence that is at least 70%, 75%, 80%, 85%, 90%, 91%, 92%, 93%, 94%, 95%, 96%, 97%, 98%, 99%, 100% identical to any one of SEQ ID NOS: 4-6, 11-12, 24, 47-48, 71-72, 95-96, or 115.

[0720] Embodiment 408. The device of any one of embodiments 381-407, wherein the complex between the peptide-conjugate and the one or more capture molecules receptor on the surface is visible on the surface using color, reflectance, fluorescence, bioluminescence, or chemiluminescence.

[0721] Embodiment 409. The device of any one of embodiments 381-408, wherein the one or more capture molecules is specific to one or more antibodies against the coronavirus.

[0722] Embodiment 410. The device of any one of embodiments 381-409, wherein the one or more capture molecules specific to one or more antibodies against the coronavirus is labeled.

[0723] Embodiment 411. The device of any one of embodiments 381-410, wherein device further comprises a labeled secondary capture molecule specific to the one or more capture molecules specific to one or more antibodies against the coronavirus.

[0724] Embodiment 412. The device of any one of embodiments 381-411, wherein the one or more capture molecules specific to one or more antibodies against the coronavirus is an antibody or antigen-binding fragment.

[0725] Embodiment 413. The device of any one of embodiments 381-412, wherein the antibody or antigen-binding fragment is monoclonal. antibody or antigen-binding fragment is polyclonal.

[0726] Embodiment 414. The device of any one of embodiments 381-413, wherein device further comprises a housing at least partially enclosing the surface.

[0727] Embodiment 415. The device of any one of embodiments 381-414, wherein device further comprises a sample receptor configured to receive a biological sample from a subject.

[0728] Embodiment 416. The device of any one of embodiments 381-415, wherein the sample receptor is mechanically coupled to a housing at least partially enclosing the surface.

[0729] Embodiment 417. The device of any one of embodiments 381-416, wherein the biological sample comprises one or more antibodies specific to the peptide.

[0730] Embodiment 418. The device of any one of embodiments 381-417, wherein the biological sample does not consist of one or more antibodies specific to the peptide.

[0731] Embodiment 419. The device of any one of embodiments 381-418, wherein the one or more antibodies belong to one or more immunoglobulin classes comprising immunoglobulin M, immunoglobulin G, immunoglobulin A, immunoglobulin E, and immunoglobulin D.

[0732] Embodiment 420. The device of any one of embodiments 381-419, wherein the subject was, or is, exposed to the coronavirus.

[0733] Embodiment 421. The device of any one of embodiments 381-420, wherein exposure of the subject to the coronavirus is unknown.

[0734] Embodiment 422. The device of any one of embodiments 381-421, wherein the subject was administered a vaccine against the coronavirus.

[0735] Embodiment 423. The device of any one of embodiments 381-422, wherein the biological sample comprises blood, urine, saliva, or feces.

[0736] Embodiment 424. The device of any one of embodiments 381-423, wherein the blood is capillary blood.

[0737] Embodiment 425. The device of any one of embodiments 381-424, wherein device further comprises a transdermal puncture device configured to obtain the capillary blood from the subject.

[0738] Embodiment 426. The device of any one of embodiments 381-425, wherein the sample receptor comprises a filter to separate serum from the blood.

[0739] Embodiment 427. The device of any one of embodiments 381-426, wherein the device is a single integrated device.

[0740] Embodiment 428. Aspects disclosed herein provide a kit comprising: (a) a lateral flow assay assembly comprising: a composition comprising: a first peptide or protein derived from an ACE2, a portion thereof; or a second peptide or protein derived from a spike glycoprotein of SARS-CoV-2 or variant thereof, or a portion thereof, the first peptide or protein or the second peptide or protein comprising a detectable moiety; and a porous membrane comprising: (1) a test zone, wherein the test zone comprises: one or more capture molecules coupled to the porous membrane at the test zone, the one or more capture molecules comprising: (i) a third peptide or protein derived from the spike glycoprotein of the SARS-CoV-2 or variant thereof, or a portion thereof; (ii) a fourth peptide or protein derived from the ACE2, or portion thereof; or (iii) a primary capture molecule specific to (i), (ii), or a protein tag conjugated thereto; and (b) instructions for assaying a biological sample with the lateral flow assay assembly to detect a presence, an absence, or a quantity of neutralizing antibodies against SARS-CoV-2 or variant thereof in the biological sample, or a component thereof.

[0741] Embodiment 429. The kit of embodiment 428, wherein the kit further comprises a sample receptor mechanically coupled to the porous membrane, the sample receptor configured to contain the biological sample.

[0742] Embodiment 430. The device of any one of embodiments 428-429, wherein the kit further comprises instructions for: obtaining the biological sample; assaying the biological sample with the lateral flow assay assembly to detect a presence, an absence, or a quantity of a binding complex between the composition and the one or more capture molecules in the biological sample, or component thereof; and classifying the biological sample as having the presence, the absence, or the quantity of the neutralizing antibodies against the SARS-CoV-2 or variant thereof.

[0743] Embodiment 431. The device of any one of embodiments 428-430, wherein the kit further comprises instructions for downloading a mobile application on a personal electronic device, the mobile application configured to analyze image data from an image of the test zone of the lateral flow assay assembly to classify the biological sample as having the presence, the absence, or the quantity of neutralizing antibodies against the SARS-CoV-2 or variant thereof.

[0744] Embodiment 432. The device of any one of embodiments 428-431, wherein the kit further comprises: (a) an second primary capture molecule specific to one or more antibodies against the SARS-CoV-2 or variant thereof, wherein the one or more antibodies against SARS-CoV-2 or variant thereof comprises an immunoglobulin G, an immunoglobulin M, an immunoglobulin A, or a combination thereof; and (b) instructions for: detecting a presence, an absence, or a quantity of a binding complex between the second primary capture molecules and the one or more antibodies against the SARS-CoV-2 or variant thereof in the biological sample or a component thereof, by bringing the biological sample or component thereof into contact with the second primary capture molecule in (a); and classifying the biological sample as having a presence, an absence, or a quantity of the one or more antibodies against the SARS-CoV-2 or variant thereof in the biological sample or component thereof based on the presence, the absence or the quantity of the binding complex that is detected.

[0745] Embodiment 433. Aspects disclosed herein provide a method comprising: step (a) providing a biological sample from a subject; step (b) analyzing the biological sample, or first component thereof, to detect a presence, an absence, or a quantity of neutralizing antibodies against a severe acute respiratory syndrome coronavirus 2 (SARS-CoV-2) or variant thereof by: contacting the first component of the biological sample to a first peptide or protein derived from a spike protein of the SARS-CoV-2 or variant thereof, or a portion thereof, in the presence of a second peptide or protein derived from an angiotensin converting enzyme 2 (ACE2), or a portion thereof, wherein the first peptide or protein or the second peptide or protein comprises a detectable moiety; and detecting the presence, the absence, or the quantity of one or more neutralizing antibodies in the biological sample that functionally block binding between the first peptide or protein and the second peptide or protein by detecting a binding complex between the first peptide or protein and the second peptide or protein in the presence of the biological sample; step (c) classifying the biological sample, or first component thereof, as having the presence, the absence, or the quantity of neutralizing antibodies to the SARS-CoV-2 or variant thereof, based, at least partially, on analyzing in step (b); step (d) analyzing the biological sample, or second component thereof, to detect a presence, an absence, or a quantity of one or more antibodies against SARS-CoV-2 or variant thereof by: contacting the biological sample, or second component thereof, to a capture molecule specific to the one or more antibodies against SARS-CoV-2 or variant thereof, wherein the capture molecule comprises a detectable moiety; and detecting the presence, the absence, or the quantity of a binding complex between the capture molecule and the one or more antibodies; and step (e) classifying the biological sample, or second component thereof, as having the presence, the absence, or the quantity of the one or more antibodies against SARS-CoV-2 or variant thereof, at least partially, on analyzing in step (d).

[0746] Embodiment 434. The method of embodiment 433, wherein the classifying in step (c) comprises classifying the biological sample from the subject as positive for the presence of neutralizing antibodies against the SARS-CoV-2 or variant thereof, provided an absence of the binding complex between the first peptide or protein and the second peptide or protein is detected.

[0747] Embodiment 435. The method of any one of embodiments 433-434, wherein the classifying in step (e) comprises classifying the biological sample from the subject as positive for exposure to SARS-CoV-2 or variant thereof, provided the presence of the binding complex between the capture molecule and the one or more antibodies is detected, or providing the quantity of the binding complex between the capture molecule and the one or more antibodies is above an index or a control.

[0748] Embodiment 436. The method of any one of embodiments 433-435, wherein the steps (a)-(e) are performed at a point of need or a point of care.

[0749] Embodiment 437. The method of any one of embodiments 433-436, wherein step (b) does not utilize an immortalized cell or an immortalized cell culture.

[0750] Embodiment 438. The method of any one of embodiments 433-437, wherein the biological sample of the method comprises whole blood, blood plasma, or serum.

[0751] Embodiment 439. The method of any one of embodiments 433-428, wherein the analyzing in step (b) and analyzing in step (d) are performed with a single integrated device.

[0752] Embodiment 440. The method of any one of embodiments 433-439, wherein the steps (c) and (e) are performed by an application that runs on an electronic device, the application comprising a mobile application or a web application.

[0753] Embodiment 441. The method of any one of embodiments 433-440, wherein the application of the method is configured to generate a report comprising a status of the biological sample, the status comprising the presence, the absence, or the quantity of the neutralizing antibodies against SARS-CoV-2 or variant thereof in the biological sample.

[0754] Embodiment 442 The method of any one of embodiments 433-441, wherein the application of the method is configured to generate a report comprising a status of the biological sample, the status comprising the presence, the absence, or the quantity of the one or more antibodies against the SARS-CoV-2 or variant thereof, wherein the one or more antibodies against SARS-CoV-2 comprises immunoglobulin G, immunoglobulin M, immunoglobulin A, or a combination thereof.

[0755] Embodiment 443. Aspects disclosed herein provide a system comprising: a first testing device or module to detect a presence, an absence, or a quantity of neutralizing antibodies against SARS-CoV-2 or variant thereof, the first testing device or module comprising: a composition comprising: a first peptide or protein derived from an ACE2, or portion thereof; and a second peptide or protein derived from a spike glycoprotein of the SARS-CoV-2 or variant thereof, or a portion thereof, the first peptide or protein or the second peptide or protein comprises a detectable moiety; and a test zone for visualization of the detectable moiety; and a second testing device or module to measure a presence, an absence, or a quantity of one or more antibodies against SARS-CoV-2, or variant thereof, the second testing device or module comprising: a first surface; and one or more capture molecules coupled to a region of the first surface, the one or more capture molecules comprising: a binding domain specific to one or more antibodies against SARS-CoV-2 or variant thereof; and a detectable moiety.

[0756] Embodiment 444. The system of embodiment 443, wherein the system further comprises an imaging device operatively coupled to the first device, the imaging device configured to capture an image of the test zone.

[0757] Embodiment 445. The system of any one of embodiments 443-444, wherein the system further comprises an imaging device operatively coupled to the second device, the imaging device configured to capture an image of the region of the first surface.

[0758] Embodiment 446. The system of any one of embodiments 443-445, wherein the system further comprises an electronic device comprising one or more processors operatively coupled to the imaging device configured to run an algorithm to generate a first classification of the biological sample as having the presence, the absence, or the quantity of the neutralizing antibodies to the SARS-CoV-2 or variant thereof.

[0759] Embodiment 447. The system of any one of embodiments 443-446, wherein the system further comprises an electronic device comprising one or more processors operatively coupled to the imaging device configured to run an algorithm to generate a second classification of the biological sample as having the presence, the absence, or the quantity of the one or more antibodies against the SARS-CoV-2 or variant thereof, wherein the one or more antibodies against SARS-CoV-2 or variant thereof comprises immunoglobulin G, immunoglobulin M, immunoglobulin A, or a combination thereof.

[0760] Embodiment 448. The system of any one of embodiments 443-447, wherein the system further comprises an application that runs on an electronic device, the application configured to display on a graphical user interface a report comprising a status of the biological sample, the status comprising one or more of: the presence, the absence, or the quantity of the neutralizing antibodies against SARS-CoV-2 or variant thereof; and the presence, the absence, or the quantity of the one or more antibodies against SARS-CoV-2 or variant thereof, wherein the one or more antibodies against SARS-CoV-2 or variant thereof comprises immunoglobulin G, immunoglobulin M, immunoglobulin A, or a combination thereof.

[0761] Embodiment 449. The system of any one of embodiments 443-448, wherein the test zone of the system is positioned at a second surface and wherein either of the first peptide or protein and the second peptide or protein is coupled to the second surface at the test zone directly or indirectly.

[0762] Embodiment 450. The system of any one of embodiments 443-449, wherein the first testing module and the second testing module of the system are in a single integrated device, and wherein the first surface and the second surface are the same surface.

[0763] Embodiment 451. The system of any one of embodiments 443-450, wherein the first testing device and the second testing device are portable.

[0764] Embodiment 452. The system of any one of embodiments 443-451, wherein the first testing device or module does not consist of an immortalized cell or an immortalized cell culture.

[0765] Embodiment 453. Aspects disclosed herein provide a system for point of need or point of care comprising a testing device to detect neutralizing antibodies against a SARS-CoV-2 or variant thereof to aid in the diagnosis of a disease or a condition caused by SARS-CoV-2 or variant thereof, the testing device comprising a composition comprising: a first peptide or protein derived from an ACE2, or portion thereof; and a second peptide or protein derived from a spike glycoprotein of the SARS-CoV-2 or variant thereof, or portion thereof, wherein at least one of the first peptide or protein and the second peptide or protein is labeled with a detectable moiety.

[0766] Embodiment 454. The system of embodiment 453, wherein the system further comprises an application configured to run on the electronic device, the application configured to generate a classification of a biological sample as having a presence, an absence, or a quantity of neutralizing antibodies against the SARS-CoV-2 or variant thereof based on a presence, an absence, or a quantity of a binding complex between the first peptide or protein and the second peptide or protein in the presence of the biological sample.

[0767] Embodiment 455. The system of any one of embodiments 453-454, wherein the classification of the biological sample is indicative of at least one of: (a) a diagnosis related to the disease or the condition caused by SARS-CoV-2; (b) a prognosis related to adaptive immunity of the subject against an infection by the SARS-CoV-2 or variant thereof, or the disease or the condition caused by the SARS-CoV-2; and (c) a measure of susceptibility of the subject to an infection by the SARS-CoV-2.

[0768] Embodiment 456. The system of any one of embodiments 453-455, wherein the system further comprises a vaccine composition against the SARS-CoV-2 or variant thereof, wherein the testing device is capable of identifying the subject as being in need of treatment with the vaccine composition based on any one of (a)-(c).

[0769] Embodiment 457. The system of any one of embodiments 453-456, wherein the testing device is a point of need or a point of care device.

[0770] Embodiment 458. The system of any one of embodiments 453-457, wherein the system does not consist of an immortalized cell or an immortalized cell culture.

[0771] Embodiment 459. The system of any one of embodiments 453-458, wherein the electronic device of the system is a personal electronic device comprising a smartphone, a tablet, or a personal computer.

[0772] Embodiment 460. Aspects disclosed herein provide a system comprising a lateral flow assay assembly comprising: (i) a composition comprising: a first peptide or protein derived from an ACE2, a portion thereof; or a second peptide or protein derived from a spike glycoprotein of SARS-CoV-2 or variant thereof, or a portion thereof, the first peptide or protein or the second peptide or protein comprising a detectable moiety; and (ii) a porous membrane comprising a test zone, wherein the test zone comprises one or more capture molecules coupled to the porous membrane at the test zone, the one or more capture molecules comprising: a third peptide or protein derived from the spike glycoprotein of the SARS-CoV-2 or variant thereof, or a portion thereof; a fourth peptide or protein derived from the ACE2, or portion thereof; or a primary capture molecule specific to (i), (ii), or a protein tag conjugated thereto.

[0773] Embodiment 461. The system of embodiment 460, wherein the lateral flow assay assembly of the system is portable.

[0774] Embodiment 462. The system of any one of embodiments 460-461, wherein the system further comprises an application configured to run on a personal electronic device, the personal electronic device comprising a camera to capture an image of the test zone before or after a biological sample obtained from a subject is applied to the porous membrane, wherein the application is configured to generate a classification of the biological sample as having a presence, an absence, or a quantity of neutralizing antibodies against the SARS-CoV-2 or variant thereof based on a presence, an absence, or a quantity of a binding complex between the composition and the one or more capture molecules detected in the biological sample using the lateral flow assay assembly.

[0775] Embodiment 463. The system of any one of embodiments 460-462, wherein the one or more capture molecules of the system comprises the primary capture molecule specific to (i) the third peptide or protein or the protein tag conjugated thereto, or (ii) the fourth peptide or protein or the protein tag conjugated thereto.

[0776] Embodiment 464. The system of any one of embodiments 460-463, wherein the composition of the system comprises the second peptide or protein, and wherein the one or more capture molecules comprises (i) the fourth peptide or protein, or (ii) the primary capture molecule specific to the fourth peptide or protein, or the protein tag conjugated thereto.

[0777] Embodiment 465. The system of any one of embodiments 460-464, wherein the system further comprises a labeled second primary capture molecule specific to one or more antibodies against the SARS-CoV-2 or variant thereof, the one or more antibodies comprising an immunoglobulin G, immunoglobulin M, an immunoglobulin A, or a combination thereof.

[0778] Embodiment 466. The system of any one of embodiments 460-465, wherein the labeled second primary capture molecule is coupled to the porous membrane at the test zone.

[0779] Embodiment 467. Aspects disclosed herein provide a system comprising: (a) a first testing device or module to detect a presence, an absence, or a quantity of neutralizing antibodies against SARS-CoV-2 or variant thereof, the first testing device or module comprising: (i) a composition comprising: (1) a first peptide or protein derived from an ACE2, or portion thereof; and (2) a second peptide or protein derived from a spike glycoprotein of the SARS-CoV-2 or variant thereof, or a portion thereof, the first peptide or protein or the second peptide or protein comprises a detectable moiety; and (ii) a test zone for visualization of the detectable moiety; and (b) a second testing device or module to measure a presence, an absence, or a quantity of one or more antibodies against SARS-CoV-2, or variant thereof, the second testing device or module comprising: a first surface; and one or more capture molecules coupled to a region of the first surface, the one or more capture molecules comprising: a binding domain specific to one or more antibodies against SARS-CoV-2 or variant thereof; and a detectable moiety.

[0780] Embodiment 468. The system of embodiment 467, wherein the system further comprises an application that runs on an electronic device, the application configured to generate a classification of the biological sample, the classification comprising one or more of: the presence, the absence, or the quantity of the neutralizing antibodies against SARS-CoV-2 or variant thereof; and the presence, the absence, or the quantity of the one or more antibodies against SARS-CoV-2 or variant thereof, wherein the one or more antibodies against SARS-CoV-2 or variant thereof comprises immunoglobulin G, immunoglobulin M, immunoglobulin A, or a combination thereof.

[0781] Embodiment 469. The system of any one of embodiments 467-468, wherein the test zone is positioned at a second surface and wherein either of the first peptide or protein and the second peptide or protein is coupled to the second surface at the test zone directly or indirectly.

[0782] Embodiment 470. The system of any one of embodiments 467-469, wherein the first testing module and the second testing module are in a single integrated device, and wherein the first surface and the second surface are the same surface.

[0783] Embodiment 471. The system of any one of embodiments 467-470, wherein the first testing device and the second testing device are portable.

[0784] Embodiment 472. The system of any one of embodiments 467-471, wherein the first testing device or module does not consist of an immortalized cell or an immortal cell culture.

[0785] Embodiment 473. Aspects disclosed herein provide a system for point of need or point of care comprising a testing device to detect neutralizing antibodies against a SARS-CoV-2 or variant thereof to aid in the diagnosis of a disease or a condition caused by SARS-CoV-2 or variant thereof, the testing device comprising a composition comprising: a first peptide or protein derived from an ACE2, or portion thereof; and a second peptide or protein derived from a spike glycoprotein of the SARS-CoV-2 or variant thereof, or portion thereof, wherein at least one of the first peptide or protein and the second peptide or protein is labeled with a detectable moiety.

[0786] Embodiment 474. The system of embodiment 473, wherein the system further comprises an application configured to run on the electronic device, the application configured to generate a classification of a biological sample as having a presence, an absence, or a quantity of neutralizing antibodies against the SARS-CoV-2 or variant thereof based on a presence, an absence, or a quantity of a binding complex between the first peptide or protein and the second peptide or protein in the presence of the biological sample.

[0787] Embodiment 475. The system of any one of embodiments 473-474, wherein the classification of the biological sample is indicative of at least one of: (a) a diagnosis related to the disease or the condition caused by SARS-CoV-2; (b) a prognosis related to adaptive immunity of the subject against an infection by the SARS-CoV-2 or variant thereof, or the disease or the condition caused by the SARS-CoV-2; and (c) a measure of susceptibility of the subject to an infection by the SARS-CoV-2.

[0788] Embodiment 476. The system of any one of embodiments 473-475, wherein the system further comprises a vaccine composition against the SARS-CoV-2 or variant thereof, wherein the testing device is capable of identifying the subject as being in need of treatment with the vaccine composition based on any one of (a)-(c).

[0789] Embodiment 477. The system of any one of embodiments 473-476, wherein the testing device is a point of need or a point of care device.

[0790] Embodiment 478. The system of any one of embodiments 473-477, wherein the system does not consist of an immortalized cell or an immortalized cell culture.

[0791] Embodiment 479. The system of any one of embodiments 473-478, wherein the electronic device of the system is a personal electronic device comprising a smartphone, a tablet, or a personal computer.

[0792] Embodiment 480. Aspects disclosed herein provide a system comprising a lateral flow assay assembly comprising: (i) a composition comprising: a first peptide or protein derived from an ACE2, a portion thereof; or a second peptide or protein derived from a spike glycoprotein of SARS-CoV-2 or variant thereof, or a portion thereof, the first peptide or protein or the second peptide or protein comprising a detectable moiety; and (ii) a porous membrane comprising a test zone, wherein the test zone comprises one or more capture molecules coupled to the porous membrane at the test zone, the one or more capture molecules comprising: a third peptide or protein derived from the spike glycoprotein of the SARS-CoV-2 or variant thereof, or a portion thereof; a fourth peptide or protein derived from the ACE2, or portion thereof; or a primary capture molecule specific to (i), (ii), or a protein tag conjugated thereto.

[0793] Embodiment 481. The system of embodiment 480, wherein the lateral flow assay assembly of the system is portable.

[0794] Embodiment 482. The system of any one of embodiments 480-481, wherein the system further comprises an application configured to run on a personal electronic device, the personal electronic device comprising a camera to capture an image of the test zone before or after a biological sample obtained from a subject is applied to the porous membrane, wherein the application is configured to generate a classification of the biological sample as having a presence, an absence, or a quantity of neutralizing antibodies against the SARS-CoV-2 or variant thereof based on a presence, an absence, or a quantity of a binding complex between the composition and the one or more capture molecules detected in the biological sample using the lateral flow assay assembly.

[0795] Embodiment 483. The system of any one of embodiments 480-482, wherein the one or more capture molecules comprises the primary capture molecule specific to (i) the third peptide or protein or the protein tag conjugated thereto, or (ii) the fourth peptide or protein or the protein tag conjugated thereto.

[0796] Embodiment 484. The system of any one of embodiments 480-483, wherein the composition comprises the second peptide or protein, and wherein the one or more capture molecules comprises (i) the fourth peptide or protein, or (ii) the primary capture molecule specific to the fourth peptide or protein, or the protein tag conjugated thereto.

[0797] Embodiment 485. The system of any one of embodiments 480-484, wherein the system further comprises a labeled second primary capture molecule specific to one or more antibodies against the SARS-CoV-2 or variant thereof, the one or more antibodies comprising an immunoglobulin G, immunoglobulin M, an immunoglobulin A, or a combination thereof.

[0798] Embodiment 486. The system of any one of embodiments 480-485, wherein the labeled second primary capture molecule is coupled to the porous membrane at the test zone.

[0799] Embodiment 487. Aspects disclosed herein provide a system comprising: (a) a first testing device or module to detect a presence, an absence, or a quantity of neutralizing antibodies against SARS-CoV-2 or variant thereof, the first testing device or module comprising: (i) a composition comprising: (1) a first peptide or protein derived from an ACE2, or portion thereof; and (2) a second peptide or protein derived from a spike glycoprotein of the SARS-CoV-2 or variant thereof, or a portion thereof, the first peptide or protein or the second peptide or protein comprises a detectable moiety; and (ii) a test zone for visualization of the detectable moiety; and (b) a second testing device or module to measure a presence, an absence, or a quantity of one or more antibodies against SARS-CoV-2, or variant thereof, the second testing device or module comprising: a first surface; and one or more capture molecules coupled to a region of the first surface, the one or more capture molecules comprising: a binding domain specific to one or more antibodies against SARS-CoV-2 or variant thereof; and a detectable moiety.

[0800] Embodiment 488. The system of embodiment 487, wherein the system further comprises an application that runs on an electronic device, the application configured to generate a classification of the biological sample, the classification comprising one or more of: the presence, the absence, or the quantity of the neutralizing antibodies against SARS-CoV-2 or variant thereof; and the presence, the absence, or the quantity of the one or more antibodies against SARS-CoV-2 or variant thereof, wherein the one or more antibodies against SARS-CoV-2 or variant thereof comprises immunoglobulin G, immunoglobulin M, immunoglobulin A, or a combination thereof.

[0801] Embodiment 489. The system of any one of embodiments 487-488, wherein the test zone is positioned at a second surface and wherein either of the first peptide or protein and the second peptide or protein is coupled to the second surface at the test zone directly or indirectly.

[0802] Embodiment 490. The system of any one of embodiments 487-489, wherein the first testing module and the second testing module are in a single integrated device, and wherein the first surface and the second surface are the same surface.

[0803] Embodiment 491. The system of any one of embodiments 487-490, wherein the first testing device and the second testing device are portable.

[0804] Embodiment 492. The system of any one of embodiments 487-491, wherein the first testing device or module does not consist of an immortalized cell or an immortalized cell line.

[0805] Embodiment 493. Any of the preceding embodiments, wherein an age of the subject is at least or about 50 years old.

[0806] Embodiment 494. Any of the preceding embodiments, wherein the subject is administered a commercialized vaccine.

[0807] Embodiment 495. Any of the preceding embodiments, wherein detecting a number of binding complexes between the detectable peptide and the one or more capture molecules is performed in less than 20 minutes from the time the biological sample from the subject is contacted with the detectable peptide and the one or more capture molecules.

[0808] Embodiment 496. Any of the preceding embodiments, wherein the biological sample comprises a volume of less than 1 milliliter.

[0809] Embodiment 497. Any of the preceding embodiments, wherein the systems and methods are computer-automated.

[0810] Embodiment 498. Any of the preceding embodiments, wherein detecting a number of binding complexes between the detectable peptide and the one or more capture molecules can be performed in a single step without the need for washing.

[0811] Embodiment 499. Any of the preceding embodiments, wherein detecting a number of binding complexes between the detectable peptide and the one or more capture molecules specific to the peptide can be performed in a single step without the need for washing.

### Definitions

[0812] Unless defined otherwise, all terms of art, notations and other technical and scientific terms or terminology used herein are intended to have the same meaning as is commonly understood by one of ordinary skill in the art to which the claimed subject matter pertains. In some cases, terms with commonly understood meanings are defined herein for clarity and/or for ready reference, and the inclusion of such definitions herein should not necessarily be construed to represent a substantial difference over what is generally understood in the art.

[0813] Throughout this application, various embodiments may be presented in a range format. It should be understood that the description in range format is merely for convenience and brevity and should not be construed as an inflexible limitation on the scope of the disclosure. Accordingly, the description of a range should be considered to have specifically disclosed all the possible subranges as well as individual numerical values within that range. For example, description of a range such as from 1 to 6 should be considered to have specifically disclosed subranges such as from 1 to 3, from 1 to 4, from 1 to 5, from 2 to 4, from 2 to 6, from 3 to 6 etc., as well as individual numbers within that range, for example, 1, 2, 3, 4, 5, and 6. Ibis applies regardless of the breadth of the range.

[0814] As used in the specification and claims, the singular forms “a”, “an” and “the” include plural references unless the context clearly dictates otherwise. For example, the term “a sample” includes a plurality of samples, including mixtures thereof.

[0815] Use of absolute or sequential terms, for example, “will,” “will not,” “shall,” “shall not,” “must,” “must not,” “first,” “initially,” “next,” “subsequently,” “before,” “after,” “lastly,” and “finally,” are not meant to limit scope of the present embodiments disclosed herein but as exemplary.

[0816] As used herein, “allowed” or “allowance” in connection with a vaccine composition refers to a vaccine composition that is legally permitted by a relevant regulatory entity to be marketed for use to prevent a disease caused by a pathogen in an intended subject. In some embodiments, an allowed vaccine is approved or licensed for human use. In some embodiments, an allowed vaccine is approved, conditionally approved, or indexed for animal use. In some embodiments, the intended subject is a human. In some embodiments, the intended subject is an animal, such as a household pet or a farm animal.

[0817] As used herein, the phrases “at least one”, “one or more”, and “and/or” are open-ended expressions that are both conjunctive and disjunctive in operation. For example, each of the expressions “at least one of A, B and C”, “at least one of A, B, or C”, “one or more of A, B, and C”, “one or more of A, B, or C” and “A, B, and/or C” means A alone, B alone, C alone, A and B together, A and C together, B and C together, or A, B and C together.

[0818] Any systems, methods, software, compositions, and platforms described herein are modular and not limited to sequential steps. Accordingly, terms such as “first” and “second” do not necessarily imply priority, order of importance, or order of acts.

[0819] The term “analyte” refers to a substance whose chemical constituents or activity is measured. In some embodiments, the analyte comprises an activity of a neutralizing antibody. In some embodiments, the activity is blocking binding between a pathogen of interest (e.g., SARS-CoV-2) and a cognate receptor (e.g., ACE2). In some embodiments, the analyte is a complex comprising the spike protein bound to the neutralizing antibody at the receptor binding region of the spike protein.

[0820] The term “cloud” refers to shared or sharable storage of electronic data. The cloud may be used for archiving electronic data, sharing electronic data, and analyzing electronic data.

[0821] As used herein, the terms, “clinic,” “clinical setting,” “laboratory” or “laboratory setting” refer to a hospital, a clinic, a pharmacy, a research institution, a pathology laboratory, or other commercial business setting where trained personnel are employed to process and/or analyze biological and/or environmental samples. These terms are contrasted with point of care, a remote location, a home, a school, and otherwise non-business, non-institutional setting.

[0822] The terms “determining,” “measuring,” “evaluating,” “assessing,” “assaying,” and “analyzing” are often used interchangeably herein to refer to forms of measurement. The terms include determining if an element is present or not (for example, detection). These terms can include quantitative, qualitative or quantitative and qualitative determinations. Assessing is relative or absolute. “Detecting the presence of” can include determining the amount of something present in addition to determining whether it is present or absent depending on the context.

[0823] The terms “increased,” or “increase” are used herein to generally mean an increase by a statically significant amount. In some embodiments, the terms “increased,” or “increase,” mean an increase of at least 10% as compared to a reference level, for example an increase of at least about 10%, at least about 20%, or at least about 30%, or at least about 40%, or at least about 50%, or at least about 60%, or at least about 70%, or at least about 80%, or at least about 90% or up to and including a 100% increase or any increase between 10-100% as compared to a reference level, standard, or control. Other examples of “increase” include an increase of at least 2-fold, at least 5-fold, at least 10-fold, at least 20-fold, at least 50-fold, at least 100-fold, at least 1000-fold or more as compared to a reference level.

[0824] The terms, “decreased” or “decrease” are used herein generally to mean a decrease by a statistically significant amount. In some embodiments, “decreased” or “decrease” means a reduction by at least 10% as compared to a reference level, for example a decrease by at least about 20%, or at least about 30%, or at least about 40%, or at least about 50%, or at least about 60%, or at least about 70%, or at least about 80%, or at least about 90% or up to and including a 100% decrease (e.g., absent level or non-detectable level as compared to a reference level), or any decrease between 10-100% as compared to a reference level. In the context of a marker or symptom, by these terms is meant a statistically significant decrease in such level. The decrease is, for example, at least 10%, at least 20%, at least 30%, at least 40% or more, and is preferably down to a level accepted as within the range of normal for an individual without a given disease.

[0825] The terms “subject,” “individual,” or “patient” are often used interchangeably herein. A “subject” is a biological entity containing expressed genetic materials. The biological entity is a plant, animal, or microorganism, including, for example, bacteria, viruses, fungi, and protozoa. The subject is tissues, cells and their progeny of a biological entity obtained in vivo or cultured in vitro. The subject is a mammal. The mammal is a human. The subject may be diagnosed or suspected of being at high risk for a disease. In some cases, the subject is not necessarily diagnosed or suspected of being at high risk for the disease. In some embodiments, the subject is a child. In some embodiments, the subject is an adolescent. In some embodiments, the subject is an adult. In some embodiments, the age of the subject is 1, 2, 3, 4, 5, 6, 7, 8, 9, 10, 11, 12, 13, 14, 15, 16, 17, or 18 years. In some embodiments, the age of the subject is between 18 and 50 years. In some embodiments, the subject is more than or equal to about 50 years old (e.g., 65 years old). In some embodiments, the subject is between 50-100, 55-95, 60-90, 65-85, or 70-80 years old.

[0826] As used herein, the term “about” a number refers to that number plus or minus 10% of that number. The term “about” a range refers to that range minus 10% of its lowest value and plus 10% of its greatest value.

[0827] As used herein, the terms “treatment” or “treating” are used in reference to a pharmaceutical or other intervention regimen for obtaining beneficial or desired results in the recipient. Beneficial or desired results include but are not limited to a therapeutic benefit and/or a prophylactic benefit. A therapeutic benefit may refer to eradication or amelioration of symptoms or of an underlying disorder being treated. Also, a therapeutic benefit is achieved with the eradication or amelioration of one or more of the physiological symptoms associated with the underlying disorder such that an improvement is observed in the subject, notwithstanding that the subject may still be afflicted with the underlying disorder. A prophylactic effect includes delaying, preventing, or eliminating the appearance of a disease or condition, delaying or eliminating the onset of symptoms of a disease or condition, slowing, halting, or reversing the progression of a disease or condition, or any combination thereof. For prophylactic benefit, a subject at risk of developing a particular disease, or to a subject reporting one or more of the physiological symptoms of a disease may undergo treatment, even though a diagnosis of this disease may not have been made.

[0828] The term “adaptive immune response” or “adaptive immunity” as used herein refers to the components of the immune response that respond in an antigen-restricted way and encompasses cellular immune responses attributable to T lymphocytes and humoral or antibody response attributable to B cells and plasma cells. In some embodiments, the antibody response comprises neutralizing antibody response. A “cellular immune response” is indicated by any one or more of the following: cytokine/chemokine release by T cells; T-cell homing to secondary lymphoid organs; T-cell proliferation; and cytotoxic T-cell responses. Several methods are suitable to verify an antigen-specific cellular immune response, including ex vivo antigen stimulation assays of T lymphocytes and in vivo assays, such as tetramer staining of T lymphocytes. An “antibody response” is indicated at least by any one or more of the following: B cell proliferation, B-cell cytokine/chemokine release, B-cell homing to secondary lymphoid organs, antibody secretion, isotype switching to IgG type antibodies, or plasma cell differentiation. An antibody response may be verified by several methods, but a predominant method is the detection of antigen-specific antibodies in the serum or plasma of an individual. In some embodiments, the antibody comprises neutralizing antibody.

[0829] An “adjuvant” as described herein refers to a substance that, in combination with an antigen, promotes an adaptive immune response to the antigen. In some embodiments, the adjuvant is an immune stimulatory compound. In some embodiments, the adjuvant comprises analgesic adjuvants. In some embodiments, the adjuvant comprises inorganic compounds such as alum, aluminum hydroxide, aluminum phosphate, or calcium phosphate hydroxide. In some embodiments, the adjuvant comprises mineral oil or paraffin oil. In some embodiments, the adjuvant comprises bacterial products such as inactivated Bordetella pertussis, Mycobacterium bovis, tor oxoids. In some embodiments, the adjuvant comprises nonbacterial organics like squalene. In some embodiments, the adjuvant comprises the use of delivery systems such as detergents (Quil A). In some embodiments, the adjuvant comprises plant saponins such as saponin derived from Quillaja, soybean, or Polygala senega. In some embodiments, the adjuvant comprises Freund's complete adjuvant or Freund's incomplete adjuvant. In some embodiments, the adjuvant comprises food-based oil like peanut oil.

[0830] An “immune stimulatory compound” refers to a substance that specifically interacts with the innate immune system to initiate a “danger signal” that ultimately leads to the development of the adaptive components of the immune response (e.g., B cell, T cells). Immune stimulatory compounds include, without limitation, pathogen-associated molecular patterns (PAMPs) such as dsRNA, lipopolysaccharide, and CpG DNA, either naturally occurring or synthetic. Immune stimulatory compounds may be agonists of various innate immune receptors including Toll-like receptors (TLRs), NOD-like receptors, RIG-1 or MDA-5 receptors, C-type lectin receptors, or the STING pathway.

[0831] The section headings used herein are for organizational purposes only and are not to be construed as limiting the subject matter described.

### EXAMPLES

[0832] The following examples are included for illustrative purposes only and are not intended to limit the scope of the invention.

### Example 1: Detecting Adaptive Immunity in a Healthcare Worker

[0833] A healthcare worker, responding to an urgent public health crisis, needs to know whether she is immune to an infection of a pathogen of interest so that she may serve others in the community at risk for infection. In this example, the pathogen of interest is SARS-CoV-2, and the healthcare worker is exposed to SARS-CoV-2. Optionally, the healthcare worker has recovered from coronavirus disease of 2019 (COVID-19).

[0834] While at home, the healthcare worker utilizes the point of need testing device described herein to obtain capillary blood by pricking her finger. She applies the capillary blood to the sample receptor component of the testing device, where it separates the blood serum (containing the analyte of interest) and other blood components. The serum flows downstream from the sample receptor to a test zone of the testing device, where the serum is mixed with a fluid composition comprising a peptide-conjugate. In this example, the peptide comprises an amino acid sequence that is at least 95% identical to any one of SEQ ID NOS: 2-6, 11-12, 24, 47-48, 71-72, 95-96, or 115. The peptide-conjugate comprises a detectable moiety comprising a gold microsphere. Within 10-20 minutes a signal develops in the detectable zone of the testing device.

[0835] The healthcare worker takes a picture of the detectable zone using her smartphone, which is equipped with a mobile application that will interpret the results from the testing device. The mobile application displays the result via the graphical user interface of the smartphone and indicates to the healthcare worker that she is sufficiently immune to the pathogen. She returns to work immediately.

### Example 2: Detecting Adaptive Immunity to Pathogen in Blood or Blood Plasma

[0836] A donation of blood or blood plasma is tested for a presence of neutralizing antibodies that functionally block binding between a pathogen of interest and an pathogen recognition receptor. In this example, the test is performed at the point of need (e.g., a blood bank) by a technician. In this example, the pathogen of interest is SARS-CoV-2.

[0837] At the blood donation site, the technician utilizes the point of need testing device described herein to test a sample of the blood. The technician applies the blood to the sample receptor component of the testing device, where it separates the blood serum (containing the analyte of interest) and other blood components. The serum flows downstream from the sample receptor to a test zone of the testing device, where the serum is mixed with a fluid composition comprising the peptide-conjugate from Example 1. Within 10-20 minutes a signal develops in the detectable zone of the testing device.

[0838] The technician takes a picture of the detectable zone using a tablet, which is equipped with a mobile application that will interpret the results from the testing device. The mobile application displays the result via the graphical user interface of the tablet and indicates to the technician that the blood sample contains neutralizing antibodies that block binding between the spike protein of SARS-CoV-2 and human ACE2.

[0839] The technician sends the blood sample to a research laboratory to determine whether the serum isolated from this blood (containing the neutralizing antibodies) is suitable for use in convalescent plasma therapy.

### Example 3. Vaccine Development Tool and Methods of Use

[0840] A pharmaceutical company is developing a vaccine to a pathogen of interest. In this example, the pathogen of interest is SARS-CoV-2. The pharmaceutical company wants to know whether the vaccine induces the production of antibodies which block the interaction between the spike protein of SARS-Co-V-2 and the human ACE2 receptor, that mediates infection in vivo. The pharmaceutical company utilizes the testing device described herein to test the vaccine by testing a biological sample from an animal (e.g., mammal) inoculated with the vaccine.

[0841] A biological sample is obtained from a mammal that is exposed to SARS-Co-V-2, and is administered the vaccine. A researcher at the pharmaceutical company applies the biological sample to the sample receptor component of the testing device, where it separates the blood plasma/serum (containing the analyte of interest) and other blood components. The serum flows downstream from the sample receptor to a test zone of the testing device, where the serum is mixed with a fluid composition comprising the peptide-conjugate from Example 1. Within 10-20 minutes a signal develops in the detectable zone of the testing device.

[0842] The researcher takes an image of the detectable zone using an imaging device, which is equipped with an application that will interpret the results from the testing device. The application displays the result via the graphical user interface of the tablet and indicates to the researcher that biological sample contains antibodies that block the interaction between the spike protein of SARS-Co-V-2 and the human ACE2 receptor, which means that vaccine was effective. The vaccine moves on for further research and development.

### Example 4. Identifying Herd Immunity Using Artificial Intelligence

[0843] A governmental agency, responding to a global pandemic, is monitoring a population of citizens to determine whether a threshold adaptive immunity neutralizing a pathogen of interest is present in the population, such that incidences of infection are drastically reduced (also referred to as “herd immunity”). The agency provides citizens testing devices, such as those described herein; and a free mobile App that is downloaded to their mobile device. Citizens in a given population utilize the testing device, take a picture of the testing zone of the testing device using their mobile device.

[0844] The data is anonymized and uploaded into the cloud. Data includes GPS data from the mobile devices and the data from the picture that was taken for each citizen. The data is analyzed by cloud-computing by machine learning, and results are accessible to the agency via a web-portal. The results are used to identify populations of citizens that are immune from SARS-CoV-2. Geofencing is used to create geographical boundaries around where those populations reside. When a threshold number of citizens with adaptive immunity neutralizing SARS-CoV-2 is detected conferring herd immunity.

### Example 5. Ranid Deployment of Neutralization Assay for Newly Discovered Virus

[0845] A new strain of SARS-CoV-2 is discovered that has an amino acid sequence encoding the RBD comprising two amino acid substitutions, relative to SEQ ID NO: 3, 5, or 11. Referring to FIG. 8A-8B, components of the testing device described herein that were previously assembled include a surface comprising a capture molecule coupled to the surface, and a peptide-conjugate comprising a peptide derived from the ACE2 receptor and a detectable moiety (e.g., ACE2-Au).

[0846] Within weeks of the discovery of the new strain of SARS-CoV-2, a second peptide-conjugate is manufactured, the second peptide-conjugate comprising the variant RBD of the new strain of SARS-CoV-2 and conjugated to an epitope tag. The second peptide-conjugate is coupled to the surface via the surface-bound capture molecules specific to the epitope tag.

[0847] An individual in need of the testing device buys the testing device online, and downloads the mobile application on her iPhone. The testing device is mailed to the individual, and includes instructions for how to use the device and the testing device. Per the instructions provided, the individual pricks her finger to obtain capillary blood, places the drop of blood in the sample receptor of the testing device, and tilts the testing device sufficient to permit the fluid in the sample device to flow from the sample receptor to the opposite end of the testing device. If the individual has developed sufficient immunity to SARS-CoV-2, then no signal will be observed (FIG. 8B). If the individual has not developed sufficient immunity to SARS-CoV-2, then a signal will be observed (FIG. 8A).

### Example 6. Screening for a Population at Risk of Infection

[0848] A population comprising a plurality of subjects is at risk of a SARS-CoV-2 infection due to an outbreak. Accordingly, immunity of the population is determined by utilizing the systems, devices, compositions, and methods described herein. Blood cards are distributed to the subjects for collection of biological sample comprising capillary blood. The healthcare workers perform finger-prick to drop the capillary blood into each slot of the dried blood spot card. After collection of biological samples, the dried blood spot cards are sent by mail to a centralized processing and testing facility, where the blood cards are processed by automated robotics. The blood samples are tested for presence or quantity of neutralizing antibody against at least one antigen of SARS-CoV-2. Most of the subjects are determined to have sufficient quantity of neutralizing antibody, which indicates that most the subjects can carry on with normal daily activities. Some of the subjects have absence or insufficient quantity of neutralizing antibody. These subjects are asked to take shelter-in-place measure and will be vaccinated with any one of the vaccines described herein to induce neutralizing antibody.

[0849] In addition to determining the immunity due to the SARS-CoV-2 outbreak, the population is routinely screened at a time interval of once every three months. Such routine screening of the population identifies the percentage of the subjects within the population with sufficient quantity of neutralizing antibody against SARS-CoV-2. If the percentage of the subjects with sufficient quantity of neutralizing antibody is above the percentage of the herd immunity (e.g. over 70%), then the subjects with absence or insufficient quantity of neutralizing antibody do not need to be vaccinated.

[0850] The routine screening also identifies if any of the subjects are infected. The infected subjects can be asymptomatic but contagious. The routine screening is also conducted after the subjects are exposed to SARS-CoV-2. Those exposed subjects with an initial absence of neutralizing antibody against SARS-CoC-2 are retested at least one week, at least one month, or at least one year after the last exposure. Screening of the subjects for neutralizing antibody for SARS-CoV-2 identifies the subjects with the neutralizing antibody who should undergo an evaluation for assessing the symptoms or severity of the SARS-CoV-2 infection.

### Example 7. Longitudinal System for Screening

[0851] Efficacy and durability of a vaccine allowed or approved for the prevention of a disease caused by SARS-CoV-2 is assessed by assaying a biological sample from a subject who was administered the vaccine with the confirmatory diagnostic testing device described herein. The confirmatory diagnostic testing devices measures neutralizing antibodies in biological samples obtained from the subject at various time points following vaccine administration.

[0852] A biological sample is obtained from the subject prior to vaccine administration. The biological may be obtained by the subject (e.g., finger prick) and deposited on a biological sample medium (e.g., a dried blood spot card) to be stored and transported to a laboratory for processing. In this instance, the biological sample is obtained by finger pricking the subject for the biological sample comprising capillary blood. The biological may be obtained by the subject (e.g., finger prick) and deposited on a biological sample medium (e.g., a dried blood spot card) to be stored and transported to a laboratory for processing. The biological sample is tested for neutralizing antibody against antigen of SARS-CoV-2. The confirmatory diagnostic confirms absence of the neutralizing antibody in the biological sample and the subject needs to be vaccinated against SARS-CoV-2.

[0853] One month after vaccination, a biological sample comprising the capillary blood is obtained from the subject finger pricking at home. The biological sample is sent back to the laboratory for testing via the use of a blood card. The confirmatory diagnostic confirms sufficient quantity of neutralizing antibody in the biological sample, which indicates that the subject has developed adaptive immunity against SARS-CoV-2. The confirmatory diagnostic also confirms the efficacy and effectiveness of the vaccine by detecting presence and sufficient quantity of neutralizing antibody in the biological sample.

[0854] The subject is tested again at two months after vaccination, at four months after vaccination, at six months after vaccination, at one year after vaccination, at two years after vaccination, at three years after vaccination, at four years after vaccination to confirm that the vaccinated subject has maintained the sufficient quantity of the neutralizing antibody for adaptive immunity against SARS-CoV-2.

[0855] At the testing at five years after vaccination, the test reveals that vaccinated subject now has insufficient quantity of the neutralizing antibody and is in need of a booster vaccine against SARS-CoV-2.

### Example 8. Vaccine Confirmatory Diagnostic—Vaccine Comprising mRNA-1273

[0856] A clinical trial is being conducted to test efficacy and effectiveness of a SARS-CoV-2 vaccine comprising an mRNA encoding the full-length, prefusion stabilized Spike (S) protein (mRNA-1273). Subjects are enrolled into different cohorts to receive different dosages of the vaccine comprising the mRNA-1273. Subjects will receive the vaccine on Days 1 and 29 in the deltoid muscle and will be followed through 12 months post second vaccination (Day 394). Follow-up visits will occur 1, 2, and 4 weeks post each vaccination (Days 8, 15, 29, 36, 43, and 57), as well as 3, 6, and 12 months post second vaccination (Days 119, 209, and 394). The primary objective is to evaluate the safety and reactogenicity of a 2-dose vaccination schedule of mRNA-1273, given 28 days apart, across 5 dosages in healthy adults.

[0857] Primary outcome measures: solicited local and systemic adverse reactions (ARs) [Time Frame: 7 days post-vaccination]; unsolicited adverse events (AEs) [Time Frame: 28 days post-vaccination]; medically-attended adverse events (MAAEs) [Time Frame: Month 0 through Month 13]; serious adverse events (SAEs) [Time Frame: Month 0 through Month 13]; change in the measure of clinical safety laboratory values in Cohort 2 from baseline [Time Frame: Through 1 month after last vaccination]; the number and percentage of participants with abnormalities in blood pressure, temperature, HR or respiratory rate will be assessed. [Time Frame: Through 1 year after last vaccination]; the number and percentage of participants with abnormalities in physical examinations will be assessed [Time Frame: Through 1 year after last vaccination]; evaluate immunogenicity of mRNA-1273 by titer of SARS-CoV-2-specific binding antibody (bAb) measured by enzyme-linked immunosorbent assay (ELISA) [Time Frame: Through 1 year after the final dose].

[0858] Secondary outcome measures: titer of SARS-CoV-2-specific neutralizing antibody (nAb) using the testing devices described herein [Time Frame: Through 1 year post last vaccination]; and seroconversion as measured by an increase of SARS-CoV-2-specific neutralizing antibody (nAb) titer using the testing devices described herein [Time Frame: Through 1 year post last vaccination].

[0859] Secondary outcome measures for this clinical study show that the mRNA-1273 vaccine induces neutralizing antibodies against SARS-CoV-2, indicating that mRNA-1273 is effective to confer adaptive immunity against SARS-CoV-2. This result is strongly correlative of protection against a future infection by SARS-CoV-2.

[0860] Durability of the mRNA-1273 vaccine is measured continuously throughout 1 year post the last vaccination. Seroconversion measured using the testing devices described show consistent neutralizing antibodies levels over time, indicating that the mRNA-1273 vaccine is durable. The efficacy and durability of the mRNA-1273 vaccine is continuously monitored using the testing devices described herein during Phase 0, Phase I, Phase II, Phase III, or Phase IV or after Phase IV of the clinical trial.

[0861] Upon approval of the mRNA-1273 vaccine, the vaccine will be administered to subjects in the population. Confirmatory diagnostic utilizing the systems, devices, methods, and compositions described herein will be performed to determine if the vaccinated subjects will develop and maintain sufficient quantity of neutralizing antibody. Confirmatory diagnostic will be performed at one month, two months, six months, one year, two years, three years, and four years after vaccination. Subjects with insufficient quantity of neutralizing antibody will be advised to receive a booster vaccine.

### Example 9. Vaccine Confirmatory Diagnostic—Vaccine Comprising BCG

[0862] A clinical trial is being conducted to test efficacy and effectiveness of a SARS-CoV-2 vaccine comprising Bacille Calmette-Gudrin (BCG), a vaccine originally developed for tuberculosis. Studies have shown its ability to induce potent protection against other infectious diseases: the so called non-specific effects (NSEs). A favorable in vitro or in vivo effect is observed in studies for distinct viral pathogens, e.g. respiratory syncytial virus, yellow fever, herpes simplex virus; human papilloma virus. Based on the capacity of BCG to reduce the incidence of respiratory tract infections in children, to exert antiviral effects in experimental models; and to reduce viremia in an experimental human model of viral infection, the hypothesis is that BCG vaccination induces (partial) protection against susceptibility to and/or severity of Covid-19 infection. This study evaluates the efficacy of BCG to improve the clinical course of Covid-19 infection and to prevent absenteeism in order to safeguard continuous patient care.

[0863] This randomized controlled trial is designed as a pragmatic study with a highly feasible primary endpoint, which is unplanned absenteeism, that is continuously measured on a bi-weekly basis). This allows for the most rapid identification of a beneficial outcome that would allow other subjects to also benefit from the intervention if and as soon as it is demonstrated to be effective.

[0864] Primary outcome measures health care workers absenteeism [Time Frame: Maximum of 180 days].

[0865] Secondary outcome measures: the cumulative incidence of documented COVID-19 [Time Frame: Maximum of 180 days]; the cumulative incidence of Hospital Admission due to documented COVID-19 [Time Frame: Maximum of 180 days]; the number of days of unplanned absenteeism, because of documented COVID-19 [Time Frame: Maximum of 180 days]; the cumulative incidence of self-reported acute respiratory symptoms or fever [Time Frame: Maximum of 180 days]; the cumulative incidence of death due to documented COVID-19 [Time Frame: Maximum of 180 days]; the cumulative incidence of Intensive Care Admission due to documented COVID-19 [Time Frame: Maximum of 180 days]; the number of days of absenteeism, because of imposed quarantine as a result of exposure to COVID-19 [Time Frame: Maximum of 180 days]; the number of days of absenteeism, because of imposed quarantine as a result of having acute respiratory symptoms, fever or documented COVID-19 [Time Frame: Maximum of 180 days]; the number of days of unplanned absenteeism because of self-reported acute respiratory symptoms [Time Frame: Maximum of 180 days]; the number of days of self-reported fever (?38 gr C) [Time Frame: Maximum of 180 days]; the cumulative incidence of self-reported fever (238 gr C) [Time Frame: Maximum of 180 days]; the number of days of self-reported acute respiratory symptoms [Time Frame: Maximum of 180 days]; the cumulative incidence of self-reported acute respiratory symptoms [Time Frame: Maximum of 180 days]; the cumulative incidence of death for any reason [Time Frame: Maximum of 180 days]; the cumulative incidence of Intensive Care Admission for any reason [Time Frame: Maximum of 180 days]; the cumulative incidence of Hospital Admission for any reason [Time Frame: Maximum of 180 days], and the cumulative incidence and magnitude of plasma/serum antibodies (IgA,M,G) and SARS-CoV-2-specific antibodies at 12 weeks after vaccination and at the end of the study period [Time Frame: Maximum of 180 days]

[0866] In addition, the subjects are scheduled to for periodic follow-up visit during and after the time frames disclosed herein. During each visit, confirmatory diagnostic will be performed to analyze a biological sample. The biological sample comprises capillary blood obtained from the subject. The biological sample is analyzed with the systems, devices, compositions, and methods described herein to detect the presence, absence, or quantity of neutralizing antibody recognizing antigen of SARS-CoV-2. Depending on the underlying pathophysiological mechanism, the efficacy or effectiveness of the vaccine is confirmed when the presence or sufficient quantity or when the absence of the neutralizing antibody recognizing an antigen of SARS-CoV-2 is detected in the biological sample. Once the confirmatory diagnostic confirms the efficacy and effectiveness of BCG, BCG progresses into the next stage of development. Confirmatory diagnostic of the efficacy and the effectiveness of the BCG vaccine is continuously performed by utilizing the systems, devices, compositions, and methods described herein during Phase 0, Phase I, Phase II, Phase III, or Phase IV or after Phase IV of the clinical trial.

[0867] Upon approval of the vaccine in this example, the vaccine will be administered to subjects in the population. Confirmatory diagnostic utilizing the systems, devices, methods, and compositions described herein will be performed to determine if the vaccinated subjects will develop and maintain sufficient quantity of neutralizing antibody. Confirmatory diagnostic will be performed at one month, two months, six months, one year, two years, three years, and four years after vaccination. Subjects with insufficient quantity of neutralizing antibody will be advised to receive a booster vaccine.

### Example 10. Vaccine Confirmatory Diagnostic—Vaccine Comprising Ad5-nCoV

[0868] A clinical trial is being conducted to test efficacy and effectiveness of a SARS-CoV-2 vaccine comprising an adenoviral vector comprising nucleic acid sequence the Spike (S) protein of SARS-CoV-2. The Ad5-nCoV vaccine is delivered via the use of lipid nanoparticle. The clinical trial is designed to assess the safety, reactogenicity and immunogenicity of Recombinant Novel Coronavirus Vaccine (Adenovirus Type 5 Vector). One hundred and eight subjects will be enrolled into one of three cohorts and will receive an intramuscular (IM) injection of experimental vaccine or placebo on Day 1 in the deltoid muscle. In the low-dose group, subjects received one dose of 5E10 vp Ad5-nCoV. In the middle-dose group, subjects received one dose of 1E11 vp Ad5-nCoV. In the high-dose group, subjects received one dose of 1.5E11vp Ad5-nCoV. Primary outcome measures safety indexes of adverse reactions [Time Frame: 0-7 days post-vaccination].

[0869] Secondary outcome measures: titer of SARS-CoV-2-specific neutralizing antibody (nAb) using the testing devices described herein [Time Frame: Through 1 year post last vaccination]; and seroconversion as measured by an increase of SARS-CoV-2-specific neutralizing antibody (nAb) titer using the testing devices described herein [Time Frame: Through 1 year post last vaccination]; safety indexes of adverse events [Time Frame: 0-28 days post-vaccination], occurrence of adverse events post-vaccination; safety indexes of SAE [Time Frame: 0-28 days, within 6 months post-vaccination], occurrence of serious adverse events post-vaccination; safety indexes of lab measures [Time Frame: pre-vaccination, day 7 post-vaccination], occurrence of abnormal changes of laboratory safety examinations; immunogenicity indexes of GMT (ELISA) [Time Frame: day 14, 28, month 3, 6 post-vaccination]geometric mean titer GMT) of S-specific antibodies against 2019 novel coronavirus tested by ELISA in serum; immunogenicity indexes of GMT (pseudoviral neutralization test method) [Time Frame: day 14, 28, month 6 post-vaccination], geometric mean titer (GMT) of S-specific antibodies against 2019 novel coronavirus tested by pseudoviral neutralization test method in serum; immunogenicity indexes of seropositivity rates (ELISA) [Time Frame: day 14, 28, month 3, 6 post-vaccination], the seropositivity rates of S-specific antibodies against 2019 novel coronavirus tested by ELISA in serum; immunogenicity indexes of seropositivity rates (pseudoviral neutralization test method) [Time Frame: day 14, 28, month 6 post-vaccination], the seropositivity rates of S-specific antibodies against 2019 novel coronavirus tested by pseudoviral neutralization test method in serum; immunogenicity indexes of GMI (ELISA) [Time Frame: day 14, 28, month 3, 6 post-vaccination], geometric mean fold increase (GMI) of S-specific antibodies against 2019 novel coronavirus tested by ELISA in serum; immunogenicity indexes of GMI (pseudoviral neutralization test method) [Time Frame: day 14, 28, month 6 post-vaccination], geometric mean fold increase (GMI) of S-specific antibodies against 2019 novel coronavirus tested by pseudoviral neutralization test method in serum; immunogenicity indexes of GMC (Ad5 vector) [Time Frame: day 14, 28 month 3, 6 post-vaccination], geometric mean concentration (GMC) of anti-Ad5 vector neutralizing antibody responses; immunogenicity indexes of GMI (Ad5 vector) [Time Frame: day 14, 28, month 3, 6 post-vaccination], geometric mean fold increase (GMI) of anti-Ad5 vector neutralizing antibody responses; and immunogenicity indexes of cellular immune [Time Frame: day 14, 28, month 6 post-vaccination], specific cellular immune responses. Other outcome measures: consistency analysis (ELISA and pseudoviral neutralization test method) [Time Frame: day, 14, 28, month 6 post-vaccination], consistency analysis of S-specific antibodies against 2019 novel coronavirus tested by ELISA against those tested by pseudoviral neutralization test method; dose-response relationship (Humoral immunity) [Time Frame: day 14, 28, month 3, 6 post-vaccination], relationship between Geometric mean titer (GMT) of S protein-specific antibodies against 2019 novel coronavirus and vaccine dose among study groups; persistence analysis of anti-S protein antibodies [Time Frame: day 14, 28, month 3, 6 post-vaccination], persistence analysis of anti-S protein antibodies among study groups; time-dose-response relationship (Humoral immunity) [Time Frame: day 14, 28, month 3, 6 post-vaccination], relationship between the appearance time of S-specific antibodies against 2019 novel coronavirus and the vaccination dose; dose-response relationship (cellular immunity) [Time Frame: day 14, 28, month 6 post-vaccination], relationship between cellular immune levels against 2019 novel coronavirus and vaccine dose among study groups; persistence analysis of cellular immune [Time Frame: day 14, 28, month 6 post-vaccination], persistence analysis of specific cellular immune response; and time-dose-response relationship cellular immunity) [Time Frame: day 14, 28, month 6 post-vaccination], relationship between the appearance time of cellular immunity against 2019 novel coronavirus and the vaccination dose.

[0870] Durability of the Ad5-nCoV vaccine is measured continuously throughout 1 year post the last vaccination. Seroconversion measured using the testing devices described show consistent neutralizing antibodies levels over time, indicating that the Ad5-nCoV vaccine is durable. The efficacy and durability of the Ad5-nCoV vaccine is continuously monitored using the testing devices described herein during Phase 0, Phase I, Phase II, Phase III, or Phase IV or after Phase IV of the clinical trial.

[0871] Upon approval of the Ad5-nCoV vaccine, the vaccine will be administered to subjects in the population. Confirmatory diagnostic utilizing the systems, devices, methods, and compositions described herein will be performed to determine if the vaccinated subjects will develop and maintain sufficient quantity of neutralizing antibody. Confirmatory diagnostic will be performed at one month, two months, six months, one year, two years, three years, and four years after vaccination. Subjects with insufficient quantity of neutralizing antibody will be advised to receive a booster vaccine.

### Example 11. Vaccine Confirmatory Diagnostic—Vaccine Comprising AZD1222 (ChAdOx1 nCoV-19)

[0872] A clinical trial is being conducted to test efficacy and effectiveness of a SARS-CoV-2 vaccine comprising a replication-deficient chimpanzee adenovirus, ChAdOx1, which is engineered to express the Spike (S) protein of SARS-CoV-2. There will be 4 study groups to receive various dose of the ChAdOx1 nCoV-19. Volunteers will participate in the study for approximately 6 months, with the option to come for an additional follow up visit at Day 364. Primary outcome measures: assess efficacy of the candidate ChAdOx1 nCoV-19 against COVID-19: Number of virologically confirmed (PCR positive) symptomatic cases [Time Frame: 6 months], number of virologically confirmed (PCR positive) symptomatic cases of COVID-19; and assess the safety of the candidate vaccine ChAdOx1 nCoV: occurrence of serious adverse events (SAEs) [Time Frame: 6 months], occurrence of serious adverse events (SAEs) throughout the study duration.

[0873] Secondary outcome measures: titer of SARS-CoV-2-specific neutralizing antibody (nAb) using the testing devices described herein [Time Frame: Through 1 year post last vaccination], seroconversion as measured by an increase of SARS-CoV-2-specific neutralizing antibody (nAb) titer using the testing devices described herein [Time Frame: Through 1 year post last vaccination], assess the safety, tolerability and reactogenicity profile of the candidate vaccine ChAdOx1 nCoV: Occurrence of solicited local reactogenicity signs and symptoms [Time Frame: 7 days following vaccination], occurrence of solicited local reactogenicity signs and symptoms for 7 days following vaccination; assess the safety, tolerability and reactogenicity profile of the candidate vaccine ChAdOx1 nCoV: occurrence of solicited systemic reactogenicity signs and symptoms [Time Frame: 7 days following vaccination], occurrence of solicited systemic reactogenicity signs and symptoms for 7 days following vaccination; assess the safety, tolerability and reactogenicity profile of the candidate vaccine ChAdOx1 nCoV: Occurrence of unsolicited adverse events (AEs) [Time Frame: 28 days following vaccination], occurrence of unsolicited adverse events (AEs) for 28 days following vaccination; assess the safety, tolerability and reactogenicity profile of the candidate vaccine ChAdOx1 nCoV through standard blood tests [Time Frame: 6 months], change from baseline for safety laboratory measures (haematology and biochemistry blood results); assess the safety, tolerability and reactogenicity profile of the candidate vaccine ChAdOx1 nCoV by measuring the number of disease enhancement episodes [Time Frame: 6 months], occurrence of disease enhancement episodes; assess efficacy of the candidate ChAdOx1 nCoV-19 against severe and non-severe COVID-19 [Time Frame: 6 months], number of deaths associated with COVID-19; assess efficacy of the candidate ChAdOx1 nCoV-19 against severe and non-severe COVID-19 [Time Frame: 6 months], umber of hospital admissions associated with COVID-19; assess efficacy of the candidate ChAdOx1 nCoV-19 against severe and non-severe COVID-19 [Time Frame: 6 months], number of intensive care unit admissions associated with COVID-19; assess efficacy of the candidate ChAdOx1 nCoV-19 against severe and non-severe COVID-19 by measuring seroconversion rates [Time Frame: 6 months], proportion of people who become seropositive for non-Spike SARS-CoV-2 antigens during the study, assess cellular and humoral immunogenicity of ChAdOx1 nCoV-19 through ELISpot assays [Time Frame: 6 months], interferon-gamma (IFN-γ) enzyme-linked immunospot (ELISpot) responses to SARS-CoV-2 spike protein; and assess cellular and humoral immunogenicity of ChAdOx1 nCoV-19 [Time Frame: 6 months], quantify antibodies against SARS-CoV-2 spike protein (seroconversion rates). Other outcome measures: assess cellular and humoral immunogenicity of ChAdOx1 nCoV-19 through Virus neutralizing antibody assays [Time Frame: 6 months], virus neutralizing antibody (NAb) assays against live and/or pseudotype SARS-CoV-2 virus; and to assess safety, reactogenicity, immunogenicity and efficacy endpoints, for participants receiving prophylactic paracetamol [Time Frame: 6 months], all safety, reactogenicity, immunogenicity and efficacy endpoints.

[0874] Durability of the AZD1222 vaccine is measured continuously throughout 1 year post the last vaccination. Seroconversion measured using the testing devices described show consistent neutralizing antibodies levels over time, indicating that the AZD1222 vaccine is durable. The efficacy and durability of the AZD1222 vaccine is continuously monitored using the testing devices described herein during Phase 0, Phase I, Phase II, Phase III, or Phase IV or after Phase IV of the clinical trial.

[0875] Upon approval of the AZD1222 vaccine, the vaccine will be administered to subjects in the population. Confirmatory diagnostic utilizing the systems, devices, methods, and compositions described herein will be performed to determine if the vaccinated subjects will develop and maintain sufficient quantity of neutralizing antibody. Confirmatory diagnostic will be performed at one month, two months, six months, one year, two years, three years, and four years after vaccination. Subjects with insufficient quantity of neutralizing antibody will be advised to receive a booster vaccine.

### Example 12. Vaccine Confirmatory Diagnostic—Vaccine Comprising INO-400

[0876] A clinical trial is being conducted to test efficacy and effectiveness of a SARS-CoV-2 vaccine comprising pGX DNA plasmid with nucleic acid encoding the Spike (S) protein of SARS-CoV-2 as the insert. The plasmid will be administered intramuscularly via electroporation. There will be 2 study groups to receive various dose of the pGX plasmid. The subjects will be tasked for follow-up visits for up to 52 weeks. Primary outcome measures: percentage of participants with Adverse Events (AEs) [Time Frame: Baseline up to Week 52]; percentage of participants with administration (Injection) site reactions [Time Frame: Day 0 up to Week 52]; percentage of participants with Adverse Events of Special Interest (AESIs) [Time Frame: Baseline up to Week 52]; change from baseline in antigen-specific binding antibody titers [Time Frame: Baseline up to Week 52]; and change from baseline in antigen-specific Interferon-Gamma (IFN-γ) cellular immune response [Time Frame: Baseline up to Week 52].

[0877] Secondary outcome measures: titer of SARS-CoV-2-specific neutralizing antibody (nAb) using the testing devices described herein [Time Frame: Through 1 year post last vaccination]; and seroconversion as measured by an increase of SARS-CoV-2-specific neutralizing antibody (nAb) titer using the testing devices described herein [Time Frame: Through 1 year post last vaccination].

[0878] Durability of the INO-400 vaccine is measured continuously throughout 1 year post the last vaccination. Seroconversion measured using the testing devices described show consistent neutralizing antibodies levels over time, indicating INO-400 vaccine is durable. The efficacy and durability of the INO-400 vaccine is continuously monitored using the testing devices described herein during Phase 0, Phase I, Phase II, Phase III, or Phase IV or after Phase IV of the clinical trial.

[0879] Upon approval of the INO-400 vaccine, the vaccine will be administered to subjects in the population. Confirmatory diagnostic utilizing the systems, devices, methods, and compositions described herein will be performed to determine if the vaccinated subjects will develop and maintain sufficient quantity of neutralizing antibody. Confirmatory diagnostic will be performed at one month, two months, six months, one year, two years, three years, and four years after vaccination. Subjects with insufficient quantity of neutralizing antibody will be advised to receive a booster vaccine.

### Example 13. Vaccine Confirmatory Diagnostic—Vaccine Comprising BNT162

[0880] A clinical trial is being conducted to test efficacy and effectiveness of a SARS-CoV-2 anti-viral RNA vaccine comprising mRNA or modified mRNA to express the Spike (S) protein or a fragment thereof of SARS-CoV-2. There are four vaccine candidates being tested. Two of the four vaccine candidates include a nucleoside modified mRNA (modRNA), one includes a uridine containing mRNA (uRNA), and the fourth vaccine candidate utilizes self-amplifying mRNA (saRNA). Each mRNA format is combined with a lipid nanoparticle (LNP) formulation. The larger spike sequence is included in two of the vaccine candidates, and the smaller optimized receptor binding domain (RBD) from the spike protein is included in the other two candidates. The RBD-based candidates contain the piece of the spike that is thought to be most important for eliciting antibodies that inactivate the virus. The trial has two parts: a dose-finding part (Part A) with four dose cohorts (treatment groups) for each vaccine and one pre-defined and one optional dose level for a de-escalation approach and, a second part (Part B) dedicated to recruit expansion cohorts with dose levels which are selected from data generated in Part A. The vaccines BNT162a1, BNT162b1, and BNT162b2 will be administered using a Prime/Boost (P/B) regimen. The vaccine BNT162c2 will be administered using a Single dose (SD) regimen.

[0881] Primary outcome measures: solicited local reactions at the injection site (pain, tenderness, erythema/redness, induration/swelling) recorded up to 7±1 days after each immunization. [Time Frame: up to 7 days following each dose administration]; solicited systemic reactions (nausea, vomiting, diarrhea, headache, fatigue, myalgia, arthralgia, chills, loss of appetite, malaise, and fever) recorded up to 7±1 days after each immunization. [Time Frame: up to 7 days following each dose administration]; the proportion of subjects with at least 1 unsolicited treatment emergent adverse event (TEAE): [Time Frame: 21 days following dose administration], for BNT162a1, BNT162b1, BNT162b2 (P/B): occurring up to 21±2 days after the prime immunization; and the proportion of subjects with at least 1 unsolicited treatment emergent adverse event (TEAE): [Time Frame: 28 days following dose administration], for BNT162a1, BNT162b1, BNT162b2 (P/B): occurring up to 28±4 days after the boost immunization, and for BNT162c2 (SD): The proportion of subjects with at least 1 unsolicited TEAE occurring up to 28±4 days after the immunization.

[0882] Secondary outcome measures: titer of SARS-CoV-2-specific neutralizing antibody (nAb) using the testing devices described herein [Time Frame: Through 1 year post last vaccination], seroconversion as measured by an increase of SARS-CoV-2-specific neutralizing antibody (nAb) titer using the testing devices described herein [Time Frame: Through 1 year post last vaccination], for BNT162a1, BNT162b1, BNT162b2 (P/B): [Time Frame: up to 162 days following dose administration], functional antibody responses at 7±1 days and 21±2 days after primary immunization and at 21±2 days, 63±5 days, and 162±7 days after the boost immunization; for BNT162a1, BNT162b1, BNT162b2 (P/B): [Time Frame: up to 162 days following dose administration], fold increase in functional antibody titers 7±1 days and 21±2 days after primary immunization and at 21±2 days, 63±5 days, and 162±7 days after the boost immunization; for BNT162a1, BNT162b1, BNT162b2 (P/B): [Time Frame: up to 162 days following dose administration], number of subjects with seroconversion defined as a minimum of 4-fold increase of functional antibody titers as compared to baseline at 7±1 days and 21±2 days after primary immunization and at 21±2 days, 63f5 days, and 162±7 days after the boost immunization; for BNT162c2 (SD): [Time Frame: up to 183 days following dose administration], functional antibody responses at 7±1 days, 21±2 days, 42±3 days, 84±5 days, and 183±7 days after the primary immunization; for BNT162c2 (SD): [Time Frame: up to 183 days following dose administration], old increase in functional antibody titers at 7±1 days, 21±2 days, 42±3 days, 84±5 days, and 183±7 days after the primary immunization; and for BNT162c2 (SD): [Time Frame: up to 183 days following dose administration], number of subjects with seroconversion defined as a minimum of 4-fold increase of functional antibody titers as compared to baseline at 7±1 days, 21±2 days, 42±3 days, 84±5 days, and 183±7 days after the primary immunization.

[0883] Durability of the BNT162 vaccine is measured continuously throughout 1 year post the last vaccination. Seroconversion measured using the testing devices described show consistent neutralizing antibodies levels over time, indicating that the BNT162 vaccine is durable. The efficacy and durability of the BNT162 vaccine is continuously monitored using the testing devices described herein during Phase 0, Phase I, Phase II, Phase III, or Phase IV or after Phase IV of the clinical trial.

[0884] Upon approval of the BNT162 vaccine, the vaccine will be administered to subjects in the population. Confirmatory diagnostic utilizing the systems, devices, methods, and compositions described herein will be performed to determine if the vaccinated subjects will develop and maintain sufficient quantity of neutralizing antibody. Confirmatory diagnostic will be performed at one month, two months, six months, one year, two years, three years, and four years after vaccination. Subjects with insufficient quantity of neutralizing antibody will be advised to receive a booster vaccine.

### Example 14. Vaccine Confirmatory Diagnostic—Vaccine Comprising Inactivated Virus

[0885] A clinical trial is being conducted to test efficacy and effectiveness of a SARS-CoV-2 vaccine comprising an inactivated virus of SARS-CoV-2. Primary outcome measures incidence of adverse reactions or adverse events between 0-7 days after each doe of vaccination.

[0886] Secondary outcome measures: titer of SARS-CoV-2-specific neutralizing antibody (nAb) using the testing devices described herein [Time Frame: Through 1 year post last vaccination], seroconversion as measured by an increase of SARS-CoV-2-specific neutralizing antibody (nAb) titer using the testing devices described herein [Time Frame: Through 1 year post last vaccination], incidence of abnormal indicators of liver and kidney function, blood routine and urine routine on the 4th day after each dose of vaccination in phase I; rate of adverse reaction and adverse event at 8-28/30 days, 0-28/30 days after inoculation of each dose of vaccine; Incidence of Serious Adverse Events (SAE) within 12 months from first vaccination to completion of full vaccination schedule; four-fold growth rate and antibody level (GMT, GMI) of serum antibody against COVID-19 at 28 days after full vaccination; four-fold growth rate and antibody level (GMT, GMI) of COVID-19 antibody as determined in the 18-59 age group, bleeding shall be done at 4 and 14 days before and after each dose of vaccination, 21 days after the first dose of vaccination, 28, 90, 180 days after full vaccination completion, and 360 days after full vaccination in phase I; four-fold growth rate and antibody level (GMT, GMI) of COVID-19 antibody as determined in >=60 years old and 6-17 years old groups, bleeding shall be done before and 4 days after each dose of vaccination, 14 days after the first and second doses of vaccination, at 28 days and 90 days and 180 days and 360 days after full vaccination in phase I; cellular immunity as determined for the group at 18 years old and above, bleeding shall be done before and after first and second vaccination, before third vaccination and at 28 days, 180 days and 360 days after full vaccination in phase I; incidence of adverse reactions/events at 8-14/21/28/30 days, 0-14/21/28/30 days after inoculation of each dose of vaccine in phase II; four-fold growth rate and antibody level (GMT, GMI) of COVID-19 antibody as determined in 18-59 age group with 1 dose, bleeding shall be done before vaccination and at 28 days post full-vaccination completion in phase II; four-fold growth rate and antibody level (GMT, GMI) of COVID-19 antibody as determined in 3-doses group, bleeding shall be done before each dose and at 28 days post full vaccination in phase II; and four-fold growth rate and antibody level (GMT, GMI) of COVID-19 antibody as determined 90 days, 180 days and 360 days after full vaccination in phase II.

[0887] Durability of the vaccine comprising an inactivated virus of SARS-CoV-2 is measured continuously throughout 1 year post the last vaccination. Seroconversion measured using the testing devices described show consistent neutralizing antibodies levels over time, indicating that vaccine comprising an inactivated virus of SARS-CoV-2 is durable. The efficacy and durability of the vaccine comprising an inactivated virus of SARS-CoV-2 is continuously monitored using the testing devices described herein during Phase 0, Phase I, Phase II, Phase III, or Phase IV or after Phase IV of the clinical trial.

[0888] Upon approval of the vaccine comprising an inactivated virus of SARS-CoV-2 vaccine, the vaccine will be administered to subjects in the population. Confirmatory diagnostic utilizing the systems, devices, methods, and compositions described herein will be performed to determine if the vaccinated subjects will develop and maintain sufficient quantity of neutralizing antibody. Confirmatory diagnostic will be performed at one month, two months, six months, one year, two years, three years, and four years after vaccination. Subjects with insufficient quantity of neutralizing antibody will be advised to receive a booster vaccine.

### Example 15. Vaccine Confirmatory Diagnostic—Vaccine Comprising PiCoVacc

[0889] A clinical trial is being conducted to test efficacy and effectiveness of a SARS-CoV-2 vaccine comprising a formalin-inactivated SARS-CoV-2 virus, PiCoVacc, obtained from vero cell culture. Primary outcome measures: safety indexes of adverse reactions [Time Frame: From the beginning of the vaccination to 28 days after the whole schedule vaccination], occurrence of adverse reactions post vaccination; immunogenicity indexes of neutralizing-antibody seroconversion rates for the emergency vaccination schedule (day 0, 14) [Time Frame: The 14th day after two doses of vaccination], the seroconversion rates of neutralizing antibodies against 2019 novel coronavirus tested by micro-neutralization assay in serum; and immunogenicity indexes of neutralizing-antibody seroconversion rates for the routine vaccination schedule (day 0, 28) [Time Frame: The 28th day after two doses of vaccination], the seroconversion rates of neutralizing antibodies against 2019 novel coronavirus tested by micro-neutralization assay in serum.

[0890] Secondary outcome measures: titer of SARS-CoV-2-specific neutralizing antibody (nAb) using the testing devices described herein [Time Frame: Through 1 year post last vaccination], and seroconversion as measured by an increase of SARS-CoV-2-specific neutralizing antibody (nAb) titer using the testing devices described herein [Time Frame: Through 1 year post last vaccination], safety indexes of adverse reactions [Time Frame: 0˜7 days after each dose injection], occurrence of adverse reactions post vaccination; occurrence of abnormal changes of laboratory safety examinations (hemoglobin, WBCs, platelets, ALT, AST, total bilirubin, creatinine, creatine phosphokinase, urine protein, urine sugar, urinary erythrocyte) [Time Frame: The 3rd day after each dose injection], safety index, abnormal changes will be defined as any one of the lab indexes experiencing changes out of clinical reference value range; safety indexes of serious adverse events (SAEs) [Time Frame: From the beginning of the vaccination to 6 months after two doses of vaccination], occurrence of SAEs post vaccination; immunogenicity indexes of neutralizing-antibody seroconversion rates [Time Frame: 7, 14, 21, 42 days after the first dose injection for emergency vaccination schedule and 28, 35, 42 days after the first dose injection for the routine vaccination schedules], the seroconversion rates of neutralizing antibodies against 2019 novel coronavirus tested by micro-neutralization assay in serum; immunogenicity indexes of IgG antibody seropositivity rates [Time Frame: 7, 14, 21, 28, 42 days after the first dose injection for emergency vaccination schedule and 28, 35, 42, 56 days after the first dose injection for the routine vaccination schedule], the seropositivity rates of IgG antibody tested by ELISA serum; immunogenicity indexes IgM antibody seropositivity rates [Time Frame: 7, 14, 21, 28, 42 days after the first dose injection for emergency vaccination schedule and 28, 35, 42, 56 days after the first dose injection for the routine vaccination schedule], the seropositivity rates of IgM antibody tested by ELISA serum; immunogenicity indexes of GMT of neutralizing-antibody [Time Frame: 7, 14, 21, 28, 42 days after the first dose injection for emergency vaccination schedule and 28, 35, 42, 56 days after the first dose injection for the routine vaccination schedule], the GMT of neutralizing antibody against 2019 novel coronavirus tested by micro-neutralization assay in serum; and immunogenicity indexes of GMR of neutralizing-antibody [Time Frame: 7, 14, 21, 28, 42 days after the first dose injection for emergency vaccination schedule and 28, 35, 42, 56 days after the first dose injection for the routine vaccination schedule], the GMR of neutralizing antibody against 2019 novel coronavirus tested by micro-neutralization assay in serum. Other outcome measures: immunogenicity indexes of cellular immune [Time Frame: The 14th day after each dose vaccination], specific cellular immune responses; immunogenicity indexes of neutralizing-antibody persistence [Time Frame: 6 months after two doses of vaccination], the seropositivity rates of neutralizing antibodies against 2019 novel coronavirus tested by micro-neutralization assay in serum; immunogenicity indexes of neutralizing-antibody GMT [Time Frame: 6 months after two doses of vaccination], the GMT of neutralizing antibody against 2019 novel coronavirus tested by micro-neutralization assay in serum; safety indexes-Seropositivity rates of antinuclear antibody [Time Frame: The 7th day after each dose injection], seropositivity rates of antinuclear antibody in serum; and safety indexes-level of inflammatory factors [Time Frame: The 7th day after each dose injection], level of inflammatory factors in serum.

[0891] Durability of the PiCoVacc vaccine is measured continuously throughout 1 year post the last vaccination. Seroconversion measured using the testing devices described show consistent neutralizing antibodies levels over time, indicating that the PiCoVacc vaccine is durable. The efficacy and durability of the PiCoVacc vaccine is continuously monitored using the testing devices described herein during Phase 0, Phase I, Phase II, Phase III, or Phase IV or after Phase IV of the clinical trial.

[0892] Upon approval of the PiCoVacc vaccine, the vaccine will be administered to subjects in the population. Confirmatory diagnostic utilizing the systems, devices, methods, and compositions described herein will be performed to determine if the vaccinated subjects will develop and maintain sufficient quantity of neutralizing antibody. Confirmatory diagnostic will be performed at one month, two months, six months, one year, two years, three years, and four years after vaccination. Subjects with insufficient quantity of neutralizing antibody will be advised to receive a booster vaccine.

### Example 16. Vaccine Confirmatory Diagnostic—Vaccine Comprising bacTRL-Spike

[0893] A clinical trial is being conducted to test efficacy and effectiveness of a SARS-CoV-2 vaccine (bacTRL-Spike) comprising bifidobacterial engineered to express the Spike protein of SARS0-CoV-2. Primary outcome measures frequency of adverse events [Time Frame: Up to 12 months post-vaccination], adverse events (specifically including incidence of gastrointestinal-associated events) following administration of oral bacTRL-Spike.

[0894] Secondary outcome measures: titer of SARS-CoV-2-specific neutralizing antibody (nAb) using the testing devices described herein [Time Frame: Through 1 year post last vaccination], and seroconversion as measured by an increase of SARS-CoV-2-specific neutralizing antibody (nAb) titer using the testing devices described herein [Time Frame: Through 1 year post last vaccination], SARS-CoV-2 antibodies [Time Frame: Baseline (pre-vaccination), and 1, 3 and 12 months post-vaccination], antibody against SARS-CoV-2 Spike protein; incidence of COVID-19 infection [Time Frame: Up to 12 months post-vaccination], incidence and clinical phenotype of confirmed and probable COVID-19 infection among vaccinated participants, based on current public health definitions; bacTRL-Spike in stool post-vaccination [Time Frame: Days 7, 14, 21, and 1 and 3 months post-vaccination], isolation of viable bacTRL-Spike from stool post-vaccination; seroconversion of circulating anti-Spike IgG antibodies & stability of serum IgG titers [Time Frame: Up to 12 months post-vaccination], collection of biological samples for future studies to understand immunity against SARS-CoV-2; and effectiveness of intestinal colonization of the probiotic-based bacTRL-Spike oral vaccine [Time Frame: Up to 12 months post-vaccination], collection of biological samples for future studies to understand immunity against SARS-CoV-2.

[0895] Durability of the bacTRL-Spike vaccine is measured continuously throughout 1 year post the last vaccination. Seroconversion measured using the testing devices described show consistent neutralizing antibodies levels over time, indicating that the bacTRL-Spike vaccine is durable. The efficacy and durability of the bacTRL-Spike vaccine is continuously monitored using the testing devices described herein during Phase 0, Phase I, Phase II, Phase III, or Phase IV or after Phase IV of the clinical trial.

[0896] Upon approval of the bacTRL-Spike vaccine, the vaccine will be administered to subjects in the population. Confirmatory diagnostic utilizing the systems, devices, methods, and compositions described herein will be performed to determine if the vaccinated subjects will develop and maintain sufficient quantity of neutralizing antibody. Confirmatory diagnostic will be performed at one month, two months, six months, one year, two years, three years, and four years after vaccination. Subjects with insufficient quantity of neutralizing antibody will be advised to receive a booster vaccine.

### Example 17. Vaccine Confirmatory Diagnostic—Vaccine Comprising NVX-CoV2373

[0897] A clinical trial is being conducted to test efficacy and effectiveness of a SARS-CoV-2 vaccine comprising a multiple recombinant nanoparticle vaccine comprising a prefusion form of the Spike protein of SARS-CoV-2. Primary outcome measures: subjects with solicited AEs—Phase 1 [Time Frame: 28 days], numbers and percentages (with 95% CIs) of subjects with solicited AEs (local, systemic) for 7 days following each primary vaccination (Days 0, 21) by severity score, duration, and peak intensity. In the case of no reactogenicity, a toxicity score of zero (0) will be applied; safety Laboratory Values (serum chemistry, hematology)—Phase 1 [Time Frame: 28 days], safety laboratory values (serum chemistry, hematology) by FDA toxicity scoring (absolute and change from baseline where identified) at 7 days after each vaccination; and serum IgG antibody levels specific for the SARS-CoV-2 rS protein antigen(s)—Phase 1 [Time Frame: 35 days], serum IgG antibody levels specific for the SARS-CoV-2 rS protein antigen(s) as detected by ELISA at Day 21 and Day 35. Derived/calculated endpoints based on these data will include geometric mean ELISA units, geometric mean fold rise, and seroconversion rate (proportion of subjects with >4-fold rises in ELISA units).

[0898] Secondary outcome measures: titer of SARS-CoV-2-specific neutralizing antibody (nAb) using the testing devices described herein [Time Frame: Through 1 year post last vaccination]; and seroconversion as measured by an increase of SARS-CoV-2-specific neutralizing antibody (nAb) titer using the testing devices described herein [Time Frame: Through 1 year post last vaccination].

[0899] Durability of the NVX-CoV2373 vaccine is measured continuously throughout 1 year post the last vaccination. Seroconversion measured using the testing devices described show consistent neutralizing antibodies levels over time, indicating that the NVX-CoV2373 vaccine is durable. The efficacy and durability of the NVX-CoV2373 vaccine is continuously monitored using the testing devices described herein during Phase 0, Phase I, Phase II, Phase III, or Phase IV or after Phase IV of the clinical trial.

[0900] Upon approval of the NVX-CoV2373 vaccine, the vaccine will be administered to subjects in the population. Confirmatory diagnostic utilizing the systems, devices, methods, and compositions described herein will be performed to determine if the vaccinated subjects will develop and maintain sufficient quantity of neutralizing antibody. Confirmatory diagnostic will be performed at one month, two months, six months, one year, two years, three years, and four years after vaccination. Subjects with insufficient quantity of neutralizing antibody will be advised to receive a booster vaccine.

### Example 18. Confirmatory Diagnostic for Vaccine Licensed for Use—mRNA1273

[0901] After approval of the mRNA1272 vaccine, the vaccine is administered to a population of subjects to confer adaptive immunity against SARS-CoV-2 in the population. After vaccination, the population is routinely screened with the confirmatory diagnostic testing system and devices described herein. One month after vaccination, the subjects are asked to submit biological samples comprising capillary blood. The subjects perform finger-prick at home to drop the blood droplets onto a blood card. The blood card contains multiple slots for multiple assays to be performed. The subjects drop the blood droplets onto each slot of the blood card and mail the blood card to a centralized facility. The blood cards are processed and assayed with the systems, devices, methods, and compositions described herein at the centralized facility to detect presence, absence, and quantity of neutralizing antibody induced by the mRNA1273 vaccine. At one month after vaccination, 100% of the tested subjects are confirmed to have sufficient quantity of neutralizing antibody against SARS-CoV-2 infection.

[0902] The subjects of the population are recommended to be tested using the confirmatory diagnostic testing device or system at two months after vaccination, at six months after vaccination, at one year after vaccination, at two years after vaccination, at three years after vaccination, and at every year after to ensure that the subjects maintain sufficient quantity of neutralizing antibody. The confirmatory diagnostic also identifies the subjects with insufficient quantity of neutralizing antibody at any of the time point for which the confirmatory diagnostic is performed. These subjects are advised to receive a booster vaccine.

[0903] In addition to determining the presence, absence, or quantity of neutralizing antibody in the vaccinated subjects over time, the confirmatory diagnostic also determines the percentage of the vaccinated subjects who have sufficient neutralizing antibody. 100% of the tested subjects are confirmed to have sufficient quantity of neutralizing antibody after one year. At two years after vaccination, 93% of the tested subjects are confirmed to have sufficient quantity of neutralizing antibody. 93% is above a threshold of herd immunity. Accordingly, other than advising the 7% of the subjects without sufficient quantity of neutralizing antibody to receive a booster vaccine, no additional step is taken. At three years after vaccination, only 53% of the tested subjects are confirmed to have sufficient neutralizing antibody, which is now below the threshold of herd immunity. Accordingly, in addition to strongly urging the subjects with insufficient quantity of neutralizing antibody to receive a booster vaccine, all subjects are asked to observe social distancing rules until the percentage of the population with sufficient quantity of neutralizing antibody is above the threshold of herd immunity again.

### Example 19. Identifying Population in Need of Vaccination

[0904] A population of subjects is in need of a vaccine against a pathogen (e.g., SARS-CoV-2), but there is a limited capacity to vaccinate each subject at the same time. The testing device or system described herein is used to identify subjects that lack a sufficient adaptive immune response to the pathogen, thereby identifying the subjects as being in need of the vaccine. Optionally, individuals who belong to a high risk category (e.g., preexisting conditions, old age, and the like) may be prioritized for vaccination with the vaccine.

### Example 20. Vaccine Confirmatory Diagnostic—Vaccine Comprising AV-COVID-19

[0905] A clinical trial is being conducted to test efficacy and effectiveness of a SARS-CoV-2 vaccine consisting of autologous dendritic cells loaded with antigens from SARS-CoV-2 to prevent COVID-19 in adults. Primary outcome measures: Confirm safety [Time Frame: 6 months], confirm safety of AV-COVID-19 by adverse event monitoring.

[0906] Secondary outcome measures: titer of SARS-CoV-2-specific neutralizing antibody (nAb) using the testing devices described herein [Time Frame: Through 1 year post last vaccination]; and seroconversion as measured by an increase of SARS-CoV-2-specific neutralizing antibody (nAb) titer using the testing devices described herein [Time Frame: Through 1 year post last vaccination]; Suggestion of efficacy [Time Frame: 6 months], measurement of IgG and IgM in subject blood; Optimal dose of SARS-CoV-2 antigen [Time Frame: 6 months]; measurement of IgG and IgM in subject blood; Advantage of administering vaccine admixed with GM-CSF [Time Frame: 6 months], measurement of IgG and IgM in subject blood; Frequency of detecting IgG against SARS-CoV-2 in blood after vaccination [Time Frame: 6 months], measurement of IgG and IgM in subject blood.

[0907] Durability of the AV-COVID-19 vaccine is measured continuously throughout 1 year post the last vaccination. Seroconversion measured using the testing devices described show consistent neutralizing antibodies levels over time, indicating that the AV-COVID-19 vaccine is durable. The efficacy and durability of the AV-COVID-19 vaccine is continuously monitored using the testing devices described herein during Phase 0, Phase I, Phase II, Phase III, or Phase IV or after Phase IV of the clinical trial.

[0908] Upon approval of the AV-COVID-19 vaccine, the vaccine will be administered to subjects in the population. Confirmatory diagnostic utilizing the systems, devices, methods, and compositions described herein will be performed to determine if the vaccinated subjects will develop and maintain sufficient quantity of neutralizing antibody. Confirmatory diagnostic will be performed at one month, two months, six months, one year, two years, three years, and four years after vaccination. Subjects with insufficient quantity of neutralizing antibody will be advised to receive a booster vaccine.

### Example 21. Veterinary Use of Confirmatory Diagnostic Test

[0909] A veterinarian wishes to know whether an animal subject (e.g., a farm animal or a household pet) responded to administration of a new vaccine against SARS-CoV-2. A biological sample is obtained from the animal subject before administration of the vaccine to assess the baseline level of neutralizing antibodies against SARS-CoV-2. A biological sample is obtained from the animal subject at least 2-4 weeks following the administration of the vaccine. The testing device and systems described herein are used to measure a presence or requisite level of neutralizing antibodies against SARS-CoV-2 as compared to the baseline level of neutralizing antibodies measured before administration of the vaccine.

[0910] While preferred embodiments of the present invention have been shown and described herein, it will be obvious to those skilled in the art that such embodiments are provided by way of example only. Numerous variations, changes, and substitutions will now occur to those skilled in the art without departing from the invention. It should be understood that various alternatives to the embodiments of the invention described herein may be employed in practicing the invention. It is intended that the following claims define the scope of the invention and that methods and structures within the scope of these claims and their equivalents be covered thereby.

### Example 22. Automated and Centralized Sample Processing and Assaying

[0911] Biological samples are received at a testing facility equipped with a centralized and automated system for assaying the biological samples. Each biological sample is contained in a biological sample medium (BSM), such as a dried blood spot card. The automated system, as shown in FIG. 13, comprises a Biological Sample Processor 1302 and an Assay Assembly Block 1309, which modules and submodules are operatively connected with a mechanical arm that is controlled by a centralizing computing system programmed to input the BSMs into the biological sample processor 1302 and transfer the purified biological sample to the Assay Assembly Block 1309 without human intervention. The biological sample receiver 1303 receives BSM and a barcode on the BSM is optionally scanned by the biological sample scanner 1304. The patient data (e.g., name, preexisting condition, address, healthcare insurance provider, etc.) is stored in a database and later optionally associated with the Assay Results 1312 by one or more computer processors in the centralized computing system. The biological sample separator 1305 (e.g., a mechanical hole punch) punches a hole in the BSM to remove a segment of the biological sample, which segment falls into a well in a 96 well plate (“elution plate”). The biological sample imager 1306 is an optical apparatus that images the bottom (or sides) of the well to ensure that the segment is correctly placed into the well. The biological sample extractor 1307 adds elution buffer (phosphate-buffered saline) to the well. The 96 well plate is gently agitated at a temperature of around 4 degrees Celsius for a period of time to elute the biological sample from the segment. The biological sample is optionally purified by the biological sample purifier 1308, such as isolating blood plasma or serum from a whole blood sample. The eluent is transferred to the Assay Assembly Block 1309, where the eluent from each well of the 96 well plate are diluted 4 times (e.g., 1:80, 1:160, 1:320, 1:640) and transferred into a 384 well plate (“source plate”) by the biological sample diluter 1310. The 1536 well plate is transferred to the biological sample assay conductor 1311, which runs the assay described herein (e.g., FRET, ELISA, etc.) to measure neutralizing antibodies against the coronavirus in dilutions. A higher signal intensity correlates with absence or low levels of neutralizing antibodies in the biological sample. The assay results 1312 are stored in a database and analyzed by one or more computer processors in the centralizing computing system. The one or more computer processors are configured to receive the results from the 4 dilutions per biological sample, averages the normalized results from the 4 dilutions per biological sample, and compares the average to a predetermined cutoff for neutralizing antibody titers indicative of CoVS-ACE2 binding inhibition (as measured, for example, using a cellularly based assay as demonstrated in Tan et al., A SARS-CoV-2 surrogate virus neutralization test based on antibody-mediated blockage of ACE2-spike protein-protein interaction, Nature Biotechnology 38, 1073-1078 (2020)), and optionally associates the results from the test to the patient data.

### Example 23: Longitudinal Study of Elderly Subjects in Assisted Living Facilities

[0912] A study group of elderly subjects in assisted living facilities, ages 75 and above, will be monitored over a period of time to measure the durability and efficacy of a vaccine against a coronavirus (e.g., SARS-CoV-2). In addition to the elderly subjects who may be residents of the assisted living facility, the study may also include the staff and visitors of the assisted living facility. The environment of the study is chosen as an assisted living facility, as the subjects have high exposure to one another and are all in a patient population with lower immunity to the coronavirus due to immunosenescence. The study will determine if the vaccine has induced a sufficient level of neutralizing antibodies (nAbs) to protect the study subjects from later infection of the coronavirus, or provide a reduced severity of symptoms from the coronavirus if infection were to occur.

[0913] Before the subjects are administered a vaccine, a baseline titer of coronavirus-specific nAbs will be determined for each subject using the testing devices described herein. The subjects will then be administered a vaccine against the coronavirus and tested again to determine a titer of nAbs. Once the vaccine is administered, the subjects will then be tested regularly in monthly intervals to determine a titer of nAbs present in the patients' system as time passes.

[0914] For each test, the subjects will be asked to submit biological samples comprising capillary blood. Blood cards will be distributed to the subjects for collection of the biological samples. The subjects, or healthcare workers, will perform a finger-prick to drop the capillary blood into each slot of the dried blood spot card. After collection of biological samples, the dried blood spot cards will then be sent by mail to a centralized processing and testing facility, where the blood cards are processed, as described in Example 22.

[0915] The data in the study will show the efficacy of the vaccine to protect elderly subjects against the coronavirus. The data will show that, for elderly subjects, confidence intervals are wider, and total nAb titers are lower, indicating that patients in this elderly subgroup are in need of close monitoring. The data in this study is also applicable for patients ages 50 and older.

[0916] The data will also show that, for elderly patients ages 65 and older, an increased dose of the coronavirus vaccine is desired to provide adequate protection against the coronavirus. For example, the increased dose of the vaccine may include four times the antigen as a coronavirus vaccine for patients ages 64 and younger.

[0917] The level of nAbs is also correlated to negative PCR test results. The study will show that a high nAbs titer in the subjects is indicative of a negative PCR test result.

### Example 24: Study Showing the Effects of Obesity on Patients Diagnosed with a Coronavirus

[0918] A study group of obese subjects will be monitored over a period of time to measure the durability and efficacy of a vaccine against a coronavirus (e.g., SARS-CoV-2) for obese patients. The study will determine the effect obesity has on patients diagnosed with a coronavirus.

[0919] Before the subjects are administered a vaccine, a baseline titer of coronavirus-specific nAbs will be determined for each subject using the testing devices described herein. The subjects will then be administered a vaccine against the coronavirus and tested again to determine a titer of nAbs. Once the vaccine is administered, the subjects will then be tested regularly in monthly intervals to determine a titer of nAbs present in the patients' system as time passes.

[0920] For each test, the subjects will be asked to submit biological samples comprising capillary blood. Blood cards will be distributed to the subjects for collection of the biological samples. The subjects, or healthcare workers, will perform a finger-prick to drop the capillary blood into each slot of the dried blood spot card. After collection of biological samples, the dried blood spot cards will then be sent by mail to a centralized processing and testing facility, where the blood cards are processed, as described in Example 22.

[0921] The data will show that obese patients diagnosed with a coronavirus have an increased risk of death as compared to diagnosed patients who are not obese. The data will also show that obesity causes an increased risk of death for a coronavirus patient, and that the increased risk of death applies to all obese coronavirus patients, irrespective of the patient's race.

### Example 25: Study of Subject with a High Risk of Exposure to a Coronavirus

[0922] A study group of subjects with a high risk of exposure to a coronavirus will be monitored over a period of time to measure the durability and efficacy of a vaccine against a coronavirus (e.g., SARS-CoV-2). The subjects may be at a high risk of exposure to a coronavirus because of congregate living circumstances. For example, the subjects may include the staff, guests, and visitors living on a cruise ship, in dormitories, or other congregate living environments. The study may also include subjects with a high risk of exposure due to their working environment. The study may follow healthcare workers, meat processing workers, food industry workers, public school workers, retail workers, and workers in other high-population-density work environments. The environment of the study is chosen as congregate living and/or high-population-density work environments, as the subjects have high exposure to one another. The study will determine if the vaccine has induced a sufficient level of neutralizing antibodies (nAbs) to protect the study subjects from later infection of the coronavirus, or provide a reduced severity of symptoms from the coronavirus if infection were to occur.

[0923] Before the subjects are administered a vaccine, a baseline titer of coronavirus-specific nAbs will be determined for each subject using the testing devices described herein. The subjects will then be administered a vaccine against the coronavirus and tested again to determine a titer of nAbs. Once the vaccine is administered, the subjects will then be tested regularly in monthly intervals to determine a titer of nAbs present in the subjects' system as time passes.

[0924] For each test, the subjects will be asked to submit biological samples comprising capillary blood. Blood cards will be distributed to the subjects for collection of the biological samples. The subjects, or healthcare workers, will perform a finger-prick to drop the capillary blood into each slot of the dried blood spot card. After collection of biological samples, the dried blood spot cards will then be sent by mail to a centralized processing and testing facility, where the blood cards are processed, as described in Example 22.

[0925] The data in the study will show the efficacy of the vaccine to protect subjects, with a high risk of exposure, against the coronavirus. The data will show a minimum nAbs titer necessary to protect subjects in such congregate living and high-population-density work environments.

[0926] The level of nAbs is also correlated to negative PCR test results. The study will show that a high nAbs titer in the subjects is indicative of a negative PCR test result.

### Example 26. Performance of Neutralizing Antibody Test

[0927] To determine whether the neutralizing antibody test described herein can measure neutralizing antibodies against SARS-CoV-2 accurately, binding inhibition was measured using the neutralizing antibody test and results were compared to a sample having a known IC50. The neutralizing antibody test was performed by performing a time-resolved fluorescence resonance energy transfer (TR-FRET) reaction by the following steps:

[0928] Equal volumes (5 μl) of the ACE2 receptor protein complexed with EU, the SARS-CoV-2 Spike protein S1 subunit complexed with a FRET-acceptor for EU, and inhibitor were mixed, and were incubated for 1 hour at room temperature. In this example, the inhibitor is any solution containing neutralizing antibodies that inhibit the binding of the Spike protein S1 subunit to the ACE2 receptor protein. Specifically, multiple dilutions of a solution containing a known neutralizing antibody with an IC50 of 4 nM was used as inhibitor. Following incubation, the fluorescent signal of the test mixture was then determined as shown in Table 3, and IC50 calculated. Read TR-FRET signal in a microtiter-plate reader under settings described below in Table 2 (settings may need optimization depending on the instrument).

TABLE 2
Settings for TR-FRET Imaging

| Channel | Variable | Recommended Value |
|---|---|---|
| 1 | Excitation wavelength (nm) | 340 +/− 20 |
| | Emission wavelength (nm) | 620 +/− 10 |
| | Lag time (μs) | 60 |
| | Integration time (μs) | 500 |
| 2 | Excitation wavelength (nm) | 340 +/− 20 |
| | Emission wavelength (nm) | 665 +/− 10 |
| | Lag time (μs) | 60 |
| | Integration time (μs) | 500 |

[0929] As shown in FIG. 15, the above protocol was performed on a 384 well plate (left) and a 1536 well plate (right), and in each case, the neutralizing antibody test accurately calculated the IC50 for the known neutralizing antibody. This demonstrates that the neutralizing antibody test described herein can measure inhibition of binding between the SARS-CoV-2 S protein and human ACE2 with accuracy. The signal to baseline (“S/B”) ratio of 4.70 and 4.54 demonstrate over 4 logs of separation between the baseline and maximum signal, indicating a large dynamic range for the neutralizing antibody test. The range in percent coefficient of variation (CV %) of 3.16-4.37 and 5.33-6.01 for the 384 well plate (left) and a 1536 well plate (right), respectively, are significantly lower than industry standard for a “good” test with respect to repeatability and reproducibility. Moreover, the Z′ score of 0.81 and 0.74 for the 384 well plate (left) and a 1536 well plate (right), respectively, indicate that the neutralizing antibody test is highly reproduceable. Together, these results show that the neutralizing antibody test described herein is accurate and highly reproduceable. In addition, the neutralizing antibody test described herein is scalable at least because of the small reagent requirements (<20 μl) and because the assay does not require a “wash” step.

### Example 27. The Neutraliziny Antibody Test can Detect Varvinr Neutraliziny Antibody Responses in Human Serum Samoes

[0930] Vaccines against SARS-CoV-2 have been shown elicit a strong neutralizing antibody response in some, but not all, individuals, including vaccines that are licensed for commercial use. Measuring the binding inhibition between the SARS-CoV-2 Spike (S) protein and human ACE2 is a surrogate for measuring neutralizing antibody titers in a human subject, as shown in, as for example, Tan et al., A SARS-CoV-2 surrogate virus neutralization test based on antibody-mediated blockage of ACE2-spike protein-protein interaction, Nat Biotechnol. 2020 September; 38(9): 1073-1078, which is hereby incorporated by reference in its entirety. Since neutralizing antibody titers correlate with vaccine efficacy, measuring binding inhibition between the SARS-CoV-2 S protein and human ACE2 can evaluate vaccine efficacy for individuals in a given population. Earle, et al. Evidence for antibody as a protective correlate for COVID-19 vaccines, medRxiv preprint doi: 10.1101.2021.03.17.20200246 (Mar. 20, 2021). The following experimental design is aimed at confirming that the neutralizing antibody test described herein can quantitatively measure binding inhibition between SARS-CoV-2 S protein and human ACE2 as a surrogate for neutralizing antibody titers in human samples obtained from vaccinated subjects.

[0931] Three human blood serum samples are obtained that do not contain neutralizing antibodies against SARS-CoV-2. The samples are spiked with different known quantities of neutralizing antibodies against SARS-CoV-2 S protein, thereby mimicking human serum samples obtained from individuals in a given population vaccinated against SARS-CoV-2 having varying neutralizing antibody responses. The positive control that will be used contains a buffer with a known quantity of neutralizing antibodies against SARS-CoV-2 S protein. The negative control that will be used contains the buffer without any neutralizing antibodies against SARS-CoV-2 S protein.

[0932] Equal volumes of the ACE2 receptor protein complexed with EU, the SARS-CoV-2 Spike protein S1 subunit complexed with a FRET-acceptor for EU, and inhibitor are mixed, and are incubated for 1 hour at room temperature. In this example, the inhibitor is any solution containing neutralizing antibodies that inhibit the binding of the Spike protein S1 subunit to the ACE2 receptor protein. Specifically, multiple dilutions of a solution containing a known neutralizing antibody with an IC50 of 4 nM is used as inhibitor. Following incubation, the fluorescent signal of the test mixture was then determined as shown in Table 2, and IC50 calculated. The above protocol is performed in a 384 well plate and a 1536 well plate. In each case, the results expected to be achieved are as follows:

[0933] It is expected that the neutralizing antibody test will accurately calculate the IC50 for the known neutralizing antibody for those samples. The CV %, Z′ score, and S/B are expected to be similar to the results described in Example 26. Together, the results are expected to show that the neutralizing antibody test described herein is not only accurate, highly reproducible, and scalable, but can measure binding inhibition between SARS-CoV-2 S protein and human ACE2 as a surrogate for neutralizing antibody titers in complex human serum samples that mimic samples obtained from vaccinated human subjects.

[0934] While preferred embodiments of the present invention have been shown and described herein, it will be obvious to those skilled in the art that such embodiments are provided by way of example only. Numerous variations, changes, and substitutions will now occur to those skilled in the art without departing from the invention. It should be understood that various alternatives to the embodiments of the invention described herein may be employed in practicing the invention. It is intended that the following claims define the scope of the invention and that methods and structures within the scope of these claims and their equivalents be covered thereby.

What is claimed:

1. A method for processing a biological sample, the method comprising:
(a) bringing a capillary blood sample into contact with (i) a first polypeptide comprising an Angiotensin-converting enzyme 2 (ACE2) polypeptide or a portion thereof capable of binding to a spike protein of a coronavirus and (ii) a second polypeptide comprising the spike protein of the coronavirus or an ACE2-binding portion of the spike protein under conditions sufficient cause the first polypeptide and the second polypeptide to form a detectable binding complex; and
(b) detecting the detectable binding complex, which detecting is indicative of an absence or a low level of neutralizing antibodies against the spike protein relative to a known level of the neutralizing antibodies, wherein the neutralizing antibodies block binding between the spike protein or the ACE2-binding portion thereof and the ACE2 polypeptide or the portion thereof under conditions otherwise suitable for binding.

2. The method of claim 1, wherein the capillary blood sample has a volume comprising less than 1 milliliter (mL).

3. The method of claim 2, wherein the volume comprises less than 100 microliters (μl).

4. The method of claim 1, wherein the coronavirus is a severe acute respiratory syndrome (SARS) coronavirus.

5. The method of claim 4, wherein the SARS coronavirus is SARS coronavirus 2 (SARS-CoV-2).

6. The method of claim 1, wherein the capillary blood sample is obtained from a human subject.

7. The method of claim 1, wherein the method does not comprise a wash step whereby the first polypeptide and the second polypeptide that is unbound following (a) is substantially removed prior to detecting in (b).

8. The method of claim 1, wherein detecting the binding complex in (b) comprises measuring a fluorescence signal.

9. The method of claim 8, wherein the fluorescence signal is inversely correlated with a level of neutralizing antibodies in the capillary blood sample.

10. The method of claim 1, wherein the binding complex is immobilized to a solid support.

11. A method for processing a biological sample, the method comprising:
(a) receiving a biological sample from a subject, wherein the biological sample was obtained from the subject by one or more finger pricks;
(b) bringing the biological sample into contact with (i) a first polypeptide comprising an Angiotensin-converting enzyme 2 (ACE2) polypeptide or a portion thereof capable of binding to a spike protein of a coronavirus and (ii) a second polypeptide comprising the spike protein of the coronavirus or an ACE2-binding portion of the spike protein under conditions sufficient cause the first polypeptide and the second polypeptide to form a detectable binding complex; and
(c) detecting the detectable binding complex, which detecting is indicative of an absence or a low level of neutralizing antibodies against the spike protein relative to a known level of the neutralizing antibodies, wherein the neutralizing antibodies block binding between the spike protein or the ACE2-binding portion thereof and the ACE2 polypeptide or the portion thereof under conditions otherwise suitable for binding.

12. The method of claim 11, wherein the biological sample has a volume comprising less than 1 milliliter (mL).

13. The method of claim 12, wherein the volume comprises less than 100 microliters (μl).

14. The method of claim 11, wherein the coronavirus is a severe acute respiratory syndrome (SARS) coronavirus.

15. The method of claim 14, wherein the SARS coronavirus is SARS coronavirus 2 (SARS-CoV-2).

16. The method of claim 11, wherein the subject is a human subject.

17. The method of claim 11, wherein the method does not comprise a wash step whereby the first polypeptide and the second polypeptide that is unbound following (a) is substantially removed prior to detecting in (c).

18. The method of claim 11, wherein detecting the binding complex in (b) comprises measuring a fluorescence signal.

19. The method of claim 18, wherein the fluorescence signal is inversely correlated with a level of neutralizing antibodies in the biological sample.

20. The method of claim 11, wherein the binding complex is immobilized to a solid support.

21. A method for processing a biological sample, the method comprising:
(a) obtaining less than 1 milliliter (mL) of a biological sample from a subject;
(b) bringing the biological sample into contact with (i) a first polypeptide comprising an Angiotensin-converting enzyme 2 (ACE2) polypeptide or a portion thereof capable of binding to a spike protein of a coronavirus and (ii) a second polypeptide comprising the spike protein of the coronavirus or an ACE2-binding portion of the spike protein under conditions sufficient cause the first polypeptide and the second polypeptide to form a detectable binding complex; and
(c) detecting the detectable binding complex, which detecting is indicative of an absence or a low level of neutralizing antibodies against the spike protein relative to a known level of the neutralizing antibodies, wherein the neutralizing antibodies block binding between the spike protein or the ACE2-binding portion thereof and the ACE2 polypeptide or the portion thereof under conditions otherwise suitable for binding.

22. The method of claim 21, wherein the biological sample comprises a volume comprising less than 500 μl when it is obtained in (a).

23. The method of claim 22, wherein the volume comprises less than 100 μl.

24. The method of claim 21, wherein the coronavirus is a severe acute respiratory syndrome (SARS) coronavirus.

25. The method of claim 24, wherein the SARS coronavirus is SARS coronavirus 2 (SARS-CoV-2).

26. The method of claim 21, wherein the subject is a human subject.

27. The method of claim 21, wherein the method does not comprise a wash step whereby the first polypeptide and the second polypeptide that is unbound following (a) is substantially removed prior to detecting in (c).

28. The method of claim 21, wherein detecting the binding complex in (c) comprises measuring a fluorescence signal.

29. The method of claim 28, wherein the fluorescence signal is inversely correlated with a level of neutralizing antibodies in the biological sample.

30. The method of claim 21, wherein the binding complex is immobilized to a solid support.

The application's sequence listing, which the Patent Office published only in electronic form, follows.

SEQUENCE LISTING (116 sequences)

SEQ ID NO: 1 - protein, 805 aa, Homo sapiens [sequence omitted]

SEQ ID NO: 2 - protein, 1255 aa, Severe acute respiratory syndrome-related coronavirus
MFIFLLFLTLTSGSDLDRCTTFDDVQAPNYTQHTSSMRGVYYPDEIFRSDTLYLTQDLFLPFYSNVTGFHTINHTFGNPVIPFKDGIYFAATEKSNVVRGWVFGSTMNNKSQSVIIINNSTNVVIRACNFELCDNPFFAVSKPMGTQTHTMIFDNAFNCTFEYISDAFSLDVSEKSGNFKHLREFVFKNKDGFLYVYKGYQPIDVVRDLPSGFNTLKPIFKLPLGINITNFRAILTAFSPAQDIWGTSAAAYFVGYLKPTTFMLKYDENGTITDAVDCSQNPLAELKCSVKSFEIDKGIYQTSNFRVVPSGDVVRFPNITNLCPFGEVFNATKFPSVYAWERKKISNCVADYSVLYNSTFFSTFKCYGVSATKLNDLCFSNVYADSFVVKGDDVRQIAPGQTGVIADYNYKLPDDFMGCVLAWNTRNIDATSTGNYNYKYRYLRHGKLRPFERDISNVPFSPDGKPCTPPALNCYWPLNDYGFYTTTGIGYQPYRVVVLSFELLNAPATVCGPKLSTDLIKNQCVNFNFNGLTGTGVLTPSSKRFQPFQQFGRDVSDFTDSVRDPKTSEILDISPCSFGGVSVITPGTNASSEVAVLYQDVNCTDVSTAIHADQLTPAWRIYSTGNNVFQTQAGCLIGAEHVDTSYECDIPIGAGICASYHTVSLLRSTSQKSIVAYTMSLGADSSIAYSNNTIAIPTNFSISITTEVMPVSMAKTSVDCNMYICGDSTECANLLLQYGSFCTQLNRALSGIAAEQDRNTREVFAQVKQMYKTPTLKYFGGFNFSQILPDPLKPTKRSFIEDLLFNKVTLADAGFMKQYGECLGDINARDLICAQKFNGLTVLPPLLTDDMIAAYTAALVSGTATAGWTFGAGAALQIPFAMQMAYRFNGIGVTQNVLYENQKQIANQFNKAISQIQESLTTTSTALGKLQDVVNQNAQALNTLVKQLSSNFGAISSVLNDILSRLDKVEAEVQIDRLITGRLQSLQTYVTQQLIRAAEIRASANLAATKMSECVLGQSKRVDFCGKGYHLMSFPQAAPHGVVFLHVTYVPSQERNFTTAPAICHEGKAYFPREGVFVFNGTSWFITQRNFFSPQIITTDNTFVSGNCDVVIGIINNTVYDPLQPELDSFKEELDKYFKNHTSPDVDLGDISGINASVVNIQKEIDRLNEVAKNLNESLIDLQELGKYEQYIKWPWYVWLGFIAGLIAIVMVTILLCCMTSCCSCLKGACSCGSCCKFDEDDSEPVLKGVKLHYT

SEQ ID NO: 3 - protein, 222 aa, Severe acute respiratory syndrome-related coronavirus
RVVPSGDVVRFPNITNLCPFGEVFNATKFPSVYAWERKKISNCVADYSVLYNSTFFSTFKCYGVSATKLNDLCFSNVYADSFVVKGDDVRQIAPGQTGVIADYNYKLPDDFMGCVLAWNTRNIDATSTGNYNYKYRYLRHGKLRPFERDISNVPFSPDGKPCTPPALNCYWPLNDYGFYTTTGIGYQPYRVVVLSFELLNAPATVCGPKLSTDLIKNQCVNF

SEQ ID NO: 4 - protein, 71 aa, Severe acute respiratory syndrome-related coronavirus
NTRNIDATSTGNYNYKYRYLRHGKLRPFERDISNVPFSPDGKPCTPPALNCYWPLNDYGFYTTTGIGYQPY

SEQ ID NO: 5 - protein, 1273 aa, Severe acute respiratory syndrome coronavirus 2
MFVFLVLLPLVSSQCVNLTTRTQLPPAYTNSFTRGVYYPDKVFRSSVLHSTQDLFLPFFSNVTWFHAIHVSGTNGTKRFDNPVLPFNDGVYFASTEKSNIIRGWIFGTTLDSKTQSLLIVNNATNVVIKVCEFQFCNDPFLGVYYHKNNKSWMESEFRVYSSANNCTFEYVSQPFLMDLEGKQGNFKNLREFVFKNIDGYFKIYSKHTPINLVRDLPQGFSALEPLVDLPIGINITRFQTLLALHRSYLTPGDSSSGWTAGAAAYYVGYLQPRTFLLKYNENGTITDAVDCALDPLSETKCTLKSFTVEKGIYQTSNFRVQPTESIVRFPNITNLCPFGEVFNATRFASVYAWNRKRISNCVADYSVLYNSASFSTFKCYGVSPTKLNDLCFTNVYADSFVIRGDEVRQIAPGQTGKIADYNYKLPDDFTGCVIAWNSNNLDSKVGGNYNYLYRLFRKSNLKPFERDISTEIYQAGSTPCNGVEGFNCYFPLQSYGFQPTNGVGYQPYRVVVLSFELLHAPATVCGPKKSTNLVKNKCVNFNFNGLTGTGVLTESNKKFLPFQQFGRDIADTTDAVRDPQTLEILDITPCSFGGVSVITPGTNTSNQVAVLYQDVNCTEVPVAIHADQLTPTWRVYSTGSNVFQTRAGCLIGAEHVNNSYECDIPIGAGICASYQTQTNSPRRARSVASQSIIAYTMSLGAENSVAYSNNSIAIPTNFTISVTTEILPVSMTKTSVDCTMYICGDSTECSNLLLQYGSFCTQLNRALTGIAVEQDKNTQEVFAQVKQIYKTPPIKDFGGFNFSQILPDPSKPSKRSFIEDLLFNKVTLADAGFIKQYGDCLGDIAARDLICAQKFNGLTVLPPLLTDEMIAQYTSALLAGTITSGWTFGAGAALQIPFAMQMAYRFNGIGVTQNVLYENQKLIANQFNSAIGKIQDSLSSTASALGKLQDVVNQNAQALNTLVKQLSSNFGAISSVLNDILSRLDKVEAEVQIDRLITGRLQSLQTYVTQQLIRAAEIRASANLAATKMSECVLGQSKRVDFCGKGYHLMSFPQSAPHGVVFLHVTYVPAQEKNFTTAPAICHDGKAHFPREGVFVSNGTHWFVTQRNFYEPQIITTDNTFVSGNCDVVIGIVNNTVYDPLQPELDSFKEELDKYFKNHTSPDVDLGDISGINASVVNIQKEIDRLNEVAKNLNESLIDLQELGKYEQYIKWPWYIWLGFIAGLIAIVMVTIMLCCMTSCCSCLKGCCSCGSCCKFDEDDSEPVLKGVKLHYT

SEQ ID NO: 6 - protein, 223 aa, Severe acute respiratory syndrome coronavirus 2
RVQPTESIVRFPNITNLCPFGEVFNATRFASVYAWNRKRISNCVADYSVLYNSASFSTFKCYGVSPTKLNDLCFTNVYADSFVIRGDEVRQIAPGQTGKIADYNYKLPDDFTGCVIAWNSNNLDSKVGGNYNYLYRLFRKSNLKPFERDISTEIYQAGSTPCNGVEGFNCYFPLQSYGFQPTNGVGYQPYRVVVLSFELLHAPATVCGPKKSTNLVKNKCVNF

SEQ ID NO: 7 - DNA, 29902 bp, Severe acute respiratory syndrome coronavirus 2
attaaaggtttataccttcccaggtaacaaaccaaccaactttcgatctcttgtagatctgttctctaaacgaactttaaaatctgtgtggctgtcactcggctgcatgcttagtgcactcacgcagtataattaataactaattactgtcgttgacaggacacgagtaactcgtctatcttctgcaggctgcttacggtttcgtccgtgttgcagccgatcatcagcacatctaggtttcgtccgggtgtgaccgaaaggtaagatggagagccttgtccctggtttcaacgagaaaacacacgtccaactcagtttgcctgttttacaggttcgcgacgtgctcgtacgtggctttggagactccgtggaggaggtcttatcagaggcacgtcaacatcttaaagatggcacttgtggcttagtagaagttgaaaaaggcgttttgcctcaacttgaacagccctatgtgttcatcaaacgttcggatgctcgaactgcacctcatggtcatgttatggttgagctggtagcagaactcgaaggcattcagtacggtcgtagtggtgagacacttggtgtccttgtccctcatgtgggcgaaataccagtggcttaccgcaaggttcttcttcgtaagaacggtaataaaggagctggtggccatagttacggcgccgatctaaagtcatttgacttaggcgacgagcttggcactgatccttatgaagattttcaagaaaactggaacactaaacatagcagtggtgttacccgtgaactcatgcgtgagcttaacggaggggcatacactcgctatgtcgataacaacttctgtggccctgatggctaccctcttgagtgcattaaagaccttctagcacgtgctggtaaagcttcatgcactttgtccgaacaactggactttattgacactaagaggggtgtatactgctgccgtgaacatgagcatgaaattgcttggtacacggaacgttctgaaaagagctatgaattgcagacaccttttgaaattaaattggcaaagaaatttgacaccttcaatggggaatgtccaaattttgtatttcccttaaattccataatcaagactattcaaccaagggttgaaaagaaaaagcttgatggctttatgggtagaattcgatctgtctatccagttgcgtcaccaaatgaatgcaaccaaatgtgcctttcaactctcatgaagtgtgatcattgtggtgaaacttcatggcagacgggcgattttgttaaagccacttgcgaattttgtggcactgagaatttgactaaagaaggtgccactacttgtggttacttaccccaaaatgctgttgttaaaatttattgtccagcatgtcacaattcagaagtaggacctgagcatagtcttgccgaataccataatgaatctggcttgaaaaccattcttcgtaagggtggtcgcactattgcctttggaggctgtgtgttctcttatgttggttgccataacaagtgtgcctattgggttccacgtgctagcgctaacataggttgtaaccatacaggtgttgttggagaaggttccgaaggtcttaatgacaaccttcttgaaatactccaaaaagagaaagtcaacatcaatattgttggtgactttaaacttaatgaagagatcgccattattttggcatctttttctgcttccacaagtgcttttgtggaaactgtgaaaggtttggattataaagcattcaaacaaattgttgaatcctgtggtaattttaaagttacaaaaggaaaagctaaaaaaggtgcctggaatattggtgaacagaaatcaatactgagtcctctttatgcatttgcatcagaggctgctcgtgttgtacgatcaattttctcccgcactcttgaaactgctcaaaattctgtgcgtgttttacagaaggccgctataacaatactagatggaatttcacagtattcactgagactcattgatgctatgatgttcacatctgatttggctactaacaatctagttgtaatggcctacattacaggtggtgttgttcagttgacttcgcagtggctaactaacatctttggcactgtttatgaaaaactcaaacccgtccttgattggcttgaagagaagtttaaggaaggtgtagagtttcttagagacggttgggaaattgttaaatttatctcaacctgtgcttgtgaaattgtcggtggacaaattgtcacctgtgcaaaggaaattaaggagagtgttcagacattctttaagcttgtaaataaatttttggctttgtgtgctgactctatcattattggtggagctaaacttaaagccttgaatttaggtgaaacatttgtcacgcactcaaagggattgtacagaaagtgtgttaaatccagagaagaaactggcctactcatgcctctaaaagccccaaaagaaattatcttcttagagggagaaacacttcccacagaagtgttaacagaggaagttgtcttgaaaactggtgatttacaaccattagaacaacctactagtgaagctgttgaagctccattggttggtacaccagtttgtattaacgggcttatgttgctcgaaatcaaagacacagaaaagtactgtgcccttgcacctaatatgatggtaacaaacaataccttcacactcaaaggcggtgcaccaacaaaggttacttttggtgatgacactgtgatagaagtgcaaggttacaagagtgtgaatatcacttttgaacttgatgaaaggattgataaagtacttaatgagaagtgctctgcctatacagttgaactcggtacagaagtaaatgagttcgcctgtgttgtggcagatgctgtcataaaaactttgcaaccagtatctgaattacttacaccactgggcattgatttagatgagtggagtatggctacatactacttatttgatgagtctggtgagtttaaattggcttcacatatgtattgttctttctaccctccagatgaggatgaagaagaaggtgattgtgaagaagaagagtttgagccatcaactcaatatgagtatggtactgaagatgattaccaaggtaaacctttggaatttggtgccacttctgctgctcttcaacctgaagaagagcaagaagaagattggttagatgatgatagtcaacaaactgttggtcaacaagacggcagtgaggacaatcagacaactactattcaaacaattgttgaggttcaacctcaattagagatggaacttacaccagttgttcagactattgaagtgaatagttttagtggttatttaaaacttactgacaatgtatacattaaaaatgcagacattgtggaagaagctaaaaaggtaaaaccaacagtggttgttaatgcagccaatgtttaccttaaacatggaggaggtgttgcaggagccttaaataaggctactaacaatgccatgcaagttgaatctgatgattacatagctactaatggaccacttaaagtgggtggtagttgtgttttaagcggacacaatcttgctaaacactgtcttcatgttgtcggcccaaatgttaacaaaggtgaagacattcaacttcttaagagtgcttatgaaaattttaatcagcacgaagttctacttgcaccattattatcagctggtatttttggtgctgaccctatacattctttaagagtttgtgtagatactgttcgcacaaatgtctacttagctgtctttgataaaaatctctatgacaaacttgtttcaagctttttggaaatgaagagtgaaaagcaagttgaacaaaagatcgctgagattcctaaagaggaagttaagccatttataactgaaagtaaaccttcagttgaacagagaaaacaagatgataagaaaatcaaagcttgtgttgaagaagttacaacaactctggaagaaactaagttcctcacagaaaacttgttactttatattgacattaatggcaatcttcatccagattctgccactcttgttagtgacattgacatcactttcttaaagaaagatgctccatatatagtgggtgatgttgttcaagagggtgttttaactgctgtggttatacctactaaaaaggctggtggcactactgaaatgctagcgaaagctttgagaaaagtgccaacagacaattatataaccacttacccgggtcagggtttaaatggttacactgtagaggaggcaaagacagtgcttaaaaagtgtaaaagtgccttttacattctaccatctattatctctaatgagaagcaagaaattcttggaactgtttcttggaatttgcgagaaatgcttgcacatgcagaagaaacacgcaaattaatgcctgtctgtgtggaaactaaagccatagtttcaactatacagcgtaaatataagggtattaaaatacaagagggtgtggttgattatggtgctagattttacttttacaccagtaaaacaactgtagcgtcacttatcaacacacttaacgatctaaatgaaactcttgttacaatgccacttggctatgtaacacatggcttaaatttggaagaagctgctcggtatatgagatctctcaaagtgccagctacagtttctgtttcttcacctgatgctgttacagcgtataatggttatcttacttcttcttctaaaacacctgaagaacattttattgaaaccatctcacttgctggttcctataaagattggtcctattctggacaatctacacaactaggtatagaatttcttaagagaggtgataaaagtgtatattacactagtaatcctaccacattccacctagatggtgaagttatcacctttgacaatcttaagacacttctttctttgagagaagtgaggactattaaggtgtttacaacagtagacaacattaacctccacacgcaagttgtggacatgtcaatgacatatggacaacagtttggtccaacttatttggatggagctgatgttactaaaataaaacctcataattcacatgaaggtaaaacattttatgttttacctaatgatgacactctacgtgttgaggcttttgagtactaccacacaactgatcctagttttctgggtaggtacatgtcagcattaaatcacactaaaaagtggaaatacccacaagttaatggtttaacttctattaaatgggcagataacaactgttatcttgccactgcattgttaacactccaacaaatagagttgaagtttaatccacctgctctacaagatgcttattacagagcaagggctggtgaagctgctaacttttgtgcacttatcttagcctactgtaataagacagtaggtgagttaggtgatgttagagaaacaatgagttacttgtttcaacatgccaatttagattcttgcaaaagagtcttgaacgtggtgtgtaaaacttgtggacaacagcagacaacccttaagggtgtagaagctgttatgtacatgggcacactttcttatgaacaatttaagaaaggtgttcagataccttgtacgtgtggtaaacaagctacaaaatatctagtacaacaggagtcaccttttgttatgatgtcagcaccacctgctcagtatgaacttaagcatggtacatttacttgtgctagtgagtacactggtaattaccagtgtggtcactataaacatataacttctaaagaaactttgtattgcatagacggtgctttacttacaaagtcctcagaatacaaaggtcctattacggatgttttctacaaagaaaacagttacacaacaaccataaaaccagttacttataaattggatggtgttgtttgtacagaaattgaccctaagttggacaattattataagaaagacaattcttatttcacagagcaaccaattgatcttgtaccaaaccaaccatatccaaacgcaagcttcgataattttaagtttgtatgtgataatatcaaatttgctgatgatttaaaccagttaactggttataagaaacctgcttcaagagagcttaaagttacatttttccctgacttaaatggtgatgtggtggctattgattataaacactacacaccctcttttaagaaaggagctaaattgttacataaacctattgtttggcatgttaacaatgcaactaataaagccacgtataaaccaaatacctggtgtatacgttgtctttggagcacaaaaccagttgaaacatcaaattcgtttgatgtactgaagtcagaggacgcgcagggaatggataatcttgcctgcgaagatctaaaaccagtctctgaagaagtagtggaaaatcctaccatacagaaagacgttcttgagtgtaatgtgaaaactaccgaagttgtaggagacattatacttaaaccagcaaataatagtttaaaaattacagaagaggttggccacacagatctaatggctgcttatgtagacaattctagtcttactattaagaaacctaatgaattatctagagtattaggtttgaaaacccttgctactcatggtttagctgctgttaatagtgtcccttgggatactatagctaattatgctaagccttttcttaacaaagttgttagtacaactactaacatagttacacggtgtttaaaccgtgtttgtactaattatatgccttatttctttactttattgctacaattgtgtacttttactagaagtacaaattctagaattaaagcatctatgccgactactatagcaaagaatactgttaagagtgtcggtaaattttgtctagaggcttcatttaattatttgaagtcacctaatttttctaaactgataaatattataatttggtttttactattaagtgtttgcctaggttctttaatctactcaaccgctgctttaggtgttttaatgtctaatttaggcatgccttcttactgtactggttacagagaaggctatttgaactctactaatgtcactattgcaacctactgtactggttctataccttgtagtgtttgtcttagtggtttagattctttagacacctatccttctttagaaactatacaaattaccatttcatcttttaaatgggatttaactgcttttggcttagttgcagagtggtttttggcatatattcttttcactaggtttttctatgtacttggattggctgcaatcatgcaattgtttttcagctattttgcagtacattttattagtaattcttggcttatgtggttaataattaatcttgtacaaatggccccgatttcagctatggttagaatgtacatcttctttgcatcattttattatgtatggaaaagttatgtgcatgttgtagacggttgtaattcatcaacttgtatgatgtgttacaaacgtaatagagcaacaagagtcgaatgtacaactattgttaatggtgttagaaggtccttttatgtctatgctaatggaggtaaaggcttttgcaaactacacaattggaattgtgttaattgtgatacattctgtgctggtagtacatttattagtgatgaagttgcgagagacttgtcactacagtttaaaagaccaataaatcctactgaccagtcttcttacatcgttgatagtgttacagtgaagaatggttccatccatctttactttgataaagctggtcaaaagacttatgaaagacattctctctctcattttgttaacttagacaacctgagagctaataacactaaaggttcattgcctattaatgttatagtttttgatggtaaatcaaaatgtgaagaatcatctgcaaaatcagcgtctgtttactacagtcagcttatgtgtcaacctatactgttactagatcaggcattagtgtctgatgttggtgatagtgcggaagttgcagttaaaatgtttgatgcttacgttaatacgttttcatcaacttttaacgtaccaatggaaaaactcaaaacactagttgcaactgcagaagctgaacttgcaaagaatgtgtccttagacaatgtcttatctacttttatttcagcagctcggcaagggtttgttgattcagatgtagaaactaaagatgttgttgaatgtcttaaattgtcacatcaatctgacatagaagttactggcgatagttgtaataactatatgctcacctataacaaagttgaaaacatgacaccccgtgaccttggtgcttgtattgactgtagtgcgcgtcatattaatgcgcaggtagcaaaaagtcacaacattgctttgatatggaacgttaaagatttcatgtcattgtctgaacaactacgaaaacaaatacgtagtgctgctaaaaagaataacttaccttttaagttgacatgtgcaactactagacaagttgttaatgttgtaacaacaaagatagcacttaagggtggtaaaattgttaataattggttgaagcagttaattaaagttacacttgtgttcctttttgttgctgctattttctatttaataacacctgttcatgtcatgtctaaacatactgacttttcaagtgaaatcataggatacaaggctattgatggtggtgtcactcgtgacatagcatctacagatacttgttttgctaacaaacatgctgattttgacacatggtttagccagcgtggtggtagttatactaatgacaaagcttgcccattgattgctgcagtcataacaagagaagtgggttttgtcgtgcctggtttgcctggcacgatattacgcacaactaatggtgactttttgcatttcttacctagagtttttagtgcagttggtaacatctgttacacaccatcaaaacttatagagtacactgactttgcaacatcagcttgtgttttggctgctgaatgtacaatttttaaagatgcttctggtaagccagtaccatattgttatgataccaatgtactagaaggttctgttgcttatgaaagtttacgccctgacacacgttatgtgctcatggatggctctattattcaatttcctaacacctaccttgaaggttctgttagagtggtaacaacttttgattctgagtactgtaggcacggcacttgtgaaagatcagaagctggtgtttgtgtatctactagtggtagatgggtacttaacaatgattattacagatctttaccaggagttttctgtggtgtagatgctgtaaatttacttactaatatgtttacaccactaattcaacctattggtgctttggacatatcagcatctatagtagctggtggtattgtagctatcgtagtaacatgccttgcctactattttatgaggtttagaagagcttttggtgaatacagtcatgtagttgcctttaatactttactattccttatgtcattcactgtactctgtttaacaccagtttactcattcttacctggtgtttattctgttatttacttgtacttgacattttatcttactaatgatgtttcttttttagcacatattcagtggatggttatgttcacacctttagtacctttctggataacaattgcttatatcatttgtatttccacaaagcatttctattggttctttagtaattacctaaagagacgtgtagtctttaatggtgtttcctttagtacttttgaagaagctgcgctgtgcacctttttgttaaataaagaaatgtatctaaagttgcgtagtgatgtgctattacctcttacgcaatataatagatacttagctctttataataagtacaagtattttagtggagcaatggatacaactagctacagagaagctgcttgttgtcatctcgcaaaggctctcaatgacttcagtaactcaggttctgatgttctttaccaaccaccacaaacctctatcacctcagctgttttgcagagtggttttagaaaaatggcattcccatctggtaaagttgagggttgtatggtacaagtaacttgtggtacaactacacttaacggtctttggcttgatgacgtagtttactgtccaagacatgtgatctgcacctctgaagacatgcttaaccctaattatgaagatttactcattcgtaagtctaatcataatttcttggtacaggctggtaatgttcaactcagggttattggacattctatgcaaaattgtgtacttaagcttaaggttgatacagccaatcctaagacacctaagtataagtttgttcgcattcaaccaggacagactttttcagtgttagcttgttacaatggttcaccatctggtgtttaccaatgtgctatgaggcccaatttcactattaagggttcattccttaatggttcatgtggtagtgttggttttaacatagattatgactgtgtctctttttgttacatgcaccatatggaattaccaactggagttcatgctggcacagacttagaaggtaacttttatggaccttttgttgacaggcaaacagcacaagcagctggtacggacacaactattacagttaatgttttagcttggttgtacgctgctgttataaatggagacaggtggtttctcaatcgatttaccacaactcttaatgactttaaccttgtggctatgaagtacaattatgaacctctaacacaagaccatgttgacatactaggacctctttctgctcaaactggaattgccgttttagatatgtgtgcttcattaaaagaattactgcaaaatggtatgaatggacgtaccatattgggtagtgctttattagaagatgaatttacaccttttgatgttgttagacaatgctcaggtgttactttccaaagtgcagtgaaaagaacaatcaagggtacacaccactggttgttactcacaattttgacttcacttttagttttagtccagagtactcaatggtctttgttcttttttttgtatgaaaatgcctttttaccttttgctatgggtattattgctatgtctgcttttgcaatgatgtttgtcaaacataagcatgcatttctctgtttgtttttgttaccttctcttgccactgtagcttattttaatatggtctatatgcctgctagttgggtgatgcgtattatgacatggttggatatggttgatactagtttgtctggttttaagctaaaagactgtgttatgtatgcatcagctgtagtgttactaatccttatgacagcaagaactgtgtatgatgatggtgctaggagagtgtggacacttatgaatgtcttgacactcgtttataaagtttattatggtaatgctttagatcaagccatttccatgtgggctcttataatctctgttacttctaactactcaggtgtagttacaactgtcatgtttttggccagaggtattgtttttatgtgtgttgagtattgccctattttcttcataactggtaatacacttcagtgtataatgctagtttattgtttcttaggctatttttgtacttgttactttggcctcttttgtttactcaaccgctactttagactgactcttggtgtttatgattacttagtttctacacaggagtttagatatatgaattcacagggactactcccacccaagaatagcatagatgccttcaaactcaacattaaattgttgggtgttggtggcaaaccttgtatcaaagtagccactgtacagtctaaaatgtcagatgtaaagtgcacatcagtagtcttactctcagttttgcaacaactcagagtagaatcatcatctaaattgtgggctcaatgtgtccagttacacaatgacattctcttagctaaagatactactgaagcctttgaaaaaatggtttcactactttctgttttgctttccatgcagggtgctgtagacataaacaagctttgtgaagaaatgctggacaacagggcaaccttacaagctatagcctcagagtttagttcccttccatcatatgcagcttttgctactgctcaagaagcttatgagcaggctgttgctaatggtgattctgaagttgttcttaaaaagttgaagaagtctttgaatgtggctaaatctgaatttgaccgtgatgcagccatgcaacgtaagttggaaaagatggctgatcaagctatgacccaaatgtataaacaggctagatctgaggacaagagggcaaaagttactagtgctatgcagacaatgcttttcactatgcttagaaagttggataatgatgcactcaacaacattatcaacaatgcaagagatggttgtgttcccttgaacataatacctcttacaacagcagccaaactaatggttgtcataccagactataacacatataaaaatacgtgtgatggtacaacatttacttatgcatcagcattgtgggaaatccaacaggttgtagatgcagatagtaaaattgttcaacttagtgaaattagtatggacaattcacctaatttagcatggcctcttattgtaacagctttaagggccaattctgctgtcaaattacagaataatgagcttagtcctgttgcactacgacagatgtcttgtgctgccggtactacacaaactgcttgcactgatgacaatgcgttagcttactacaacacaacaaagggaggtaggtttgtacttgcactgttatccgatttacaggatttgaaatgggctagattccctaagagtgatggaactggtactatctatacagaactggaaccaccttgtaggtttgttacagacacacctaaaggtcctaaagtgaagtatttatactttattaaaggattaaacaacctaaatagaggtatggtacttggtagtttagctgccacagtacgtctacaagctggtaatgcaacagaagtgcctgccaattcaactgtattatctttctgtgcttttgctgtagatgctgctaaagcttacaaagattatctagctagtgggggacaaccaatcactaattgtgttaagatgttgtgtacacacactggtactggtcaggcaataacagttacaccggaagccaatatggatcaagaatcctttggtggtgcatcgtgttgtctgtactgccgttgccacatagatcatccaaatcctaaaggattttgtgacttaaaaggtaagtatgtacaaatacctacaacttgtgctaatgaccctgtgggttttacacttaaaaacacagtctgtaccgtctgcggtatgtggaaaggttatggctgtagttgtgatcaactccgcgaacccatgcttcagtcagctgatgcacaatcgtttttaaacgggtttgcggtgtaagtgcagcccgtcttacaccgtgcggcacaggcactagtactgatgtcgtatacagggcttttgacatctacaatgataaagtagctggttttgctaaattcctaaaaactaattgttgtcgcttccaagaaaaggacgaagatgacaatttaattgattcttactttgtagttaagagacacactttctctaactaccaacatgaagaaacaatttataatttacttaaggattgtccagctgttgctaaacatgacttctttaagtttagaatagacggtgacatggtaccacatatatcacgtcaacgtcttactaaatacacaatggcagacctcgtctatgctttaaggcattttgatgaaggtaattgtgacacattaaaagaaatacttgtcacatacaattgttgtgatgatgattatttcaataaaaaggactggtatgattttgtagaaaacccagatatattacgcgtatacgccaacttaggtgaacgtgtacgccaagctttgttaaaaacagtacaattctgtgatgccatgcgaaatgctggtattgttggtgtactgacattagataatcaagatctcaatggtaactggtatgatttcggtgatttcatacaaaccacgccaggtagtggagttcctgttgtagattcttattattcattgttaatgcctatattaaccttgaccagggctttaactgcagagtcacatgttgacactgacttaacaaagccttacattaagtgggatttgttaaaatatgacttcacggaagagaggttaaaactctttgaccgttattttaaatattgggatcagacataccacccaaattgtgttaactgtttggatgacagatgcattctgcattgtgcaaactttaatgttttattctctacagtgttcccacctacaagttttggaccactagtgagaaaaatatttgttgatggtgttccatttgtagtttcaactggataccacttcagagagctaggtgttgtacataatcaggatgtaaacttacatagctctagacttagttttaaggaattacttgtgtatgctgctgaccctgctatgcacgctgcttctggtaatctattactagataaacgcactacgtgcttttcagtagctgcacttactaacaatgttgcttttcaaactgtcaaacccggtaattttaacaaagacttctatgactttgctgtgtctaagggtttctttaaggaaggaagttctgttgaattaaaacacttcttctttgctcaggatggtaatgctgctatcagcgattatgactactatcgttataatctaccaacaatgtgtgatatcagacaactactatttgtagttgaagttgttgataagtactttgattgttacgatggtggctgtattaatgctaaccaagtcatcgtcaacaacctagacaaatcagctggttttccatttaataaatggggtaaggctagactttattatgattcaatgagttatgaggatcaagatgcacttttcgcatatacaaaacgtaatgtcatccctactataactcaaatgaatcttaagtatgccattagtgcaaagaatagagctcgcaccgtagctggtgtctctatctgtagtactatgaccaatagacagtttcatcaaaaattattgaaatcaatagccgccactagaggagctactgtagtaattggaacaagcaaattctatggtggttggcacaacatgttaaaaactgtttatagtgatgtagaaaaccctcaccttatgggttgggattatcctaaatgtgatagagccatgcctaacatgcttagaattatggcctcacttgttcttgctcgcaaacatacaacgtgttgtagcttgtcacaccgtttctatagattagctaatgagtgtgctcaagtattgagtgaaatggtcatgtgtggcggttcactatatgttaaaccaggtggaacctcatcaggagatgccacaactgcttatgctaatagtgtttttaacatttgtcaagctgtcacggccaatgttaatgcacttttatctactgatggtaacaaaattgccgataagtatgtccgcaatttacaacacagactttatgagtgtctctatagaaatagagatgttgacacagactttgtgaatgagttttacgcatatttgcgtaaacatttctcaatgatgatactctctgacgatgctgttgtgtgtttcaatagcacttatgcatctcaaggtctagtggctagcataaagaactttaagtcagttctttattatcaaaacaatgtttttatgtctgaagcaaaatgttggactgagactgaccttactaaaggacctcatgaattttgctctcaacatacaatgctagttaaacagggtgatgattatgtgtaccttccttacccagatccatcaagaatcctaggggccggctgttttgtagatgatatcgtaaaaacagatggtacacttatgattgaacggttcgtgtctttagctatagatgcttacccacttactaaacatcctaatcaggagtatgctgatgtctttcatttgtacttacaatacataagaaagctacatgatgagttaacaggacacatgttagacatgtattctgttatgcttactaatgataacacttcaaggtattgggaacctgagttttatgaggctatgtacacaccgcatacagtcttacaggctgttggggcttgtgttctttgcaattcacagacttcattaagatgtggtgcttgcatacgtagaccattcttatgttgtaaatgctgttacgaccatgtcatatcaacatcacataaattagtcttgtctgttaatccgtatgtttgcaatgctccaggttgtgatgtcacagatgtgactcaactttacttaggaggtatgagctattattgtaaatcacataaaccacccattagttttccattgtgtgctaatggacaagtttttggtttatataaaaatacatgtgttggtagcgataatgttactgactttaatgcaattgcaacatgtgactggacaaatgctggtgattacattttagctaacacctgtactgaaagactcaagctttttgcagcagaaacgctcaaagctactgaggagacatttaaactgtcttatggtattgctactgtacgtgaagtgctgtctgacagagaattacatctttcatgggaagttggtaaacctagaccaccacttaaccgaaattatgtctttactggttatcgtgtaactaaaaacagtaaagtacaaataggagagtacacctttgaaaaaggtgactatggtgatgctgttgtttaccgaggtacaacaacttacaaattaaatgttggtgattattttgtgctgacatcacatacagtaatgccattaagtgcacctacactagtgccacaagagcactatgttagaattactggcttatacccaacactcaatatctcagatgagttttctagcaatgttgcaaattatcaaaaggttggtatgcaaaagtattctacactccagggaccacctggtactggtaagagtcattttgctattggcctagctctctactacccttctgctcgcatagtgtatacagcttgctctcatgccgctgttgatgcactatgtgagaaggcattaaaatatttgcctatagataaatgtagtagaattatacctgcacgtgctcgtgtagagtgttttgataaattcaaagtgaattcaacattagaacagtatgtcttttgtactgtaaatgcattgcctgagacgacagcagatatagttgtctttgatgaaatttcaatggccacaaattatgatttgagtgttgtcaatgccagattacgtgctaagcactatgtgtacattggcgaccctgctcaattacctgcaccacgcacattgctaactaagggcacactagaaccagaatatttcaattcagtgtgtagacttatgaaaactataggtccagacatgttcctcggaacttgtcggcgttgtcctgctgaaattgttgacactgtgagtgctttggtttatgataataagcttaaagcacataaagacaaatcagctcaatgctttaaaatgttttataagggtgttatcacgcatgatgtttcatctgcaattaacaggccacaaataggcgtggtaagagaattccttacacgtaaccctgcttggagaaaagctgtctttatttcaccttataattcacagaatgctgtagcctcaaagattttgggactaccaactcaaactgttgattcatcacagggctcagaatatgactatgtcatattcactcaaaccactgaaacagctcactcttgtaatgtaaacagatttaatgttgctattaccagagcaaaagtaggcatactttgcataatgtctgatagagacctttatgacaagttgcaatttacaagtcttgaaattccacgtaggaatgtggcaactttacaagctgaaaatgtaacaggactctttaaagattgtagtaaggtaatcactgggttacatcctacacaggcacctacacacctcagtgttgacactaaattcaaaactgaaggtttatgtgttgacatacctggcatacctaaggacatgacctatagaagactcatctctatgatgggttttaaaatgaattatcaagttaatggttaccctaacatgtttatcacccgcgaagaagctataagacatgtacgtgcatggattggcttcgatgtcgaggggtgtcatgctactagagaagctgttggtaccaatttacctttacagctaggtttttctacaggtgttaacctagttgctgtacctacaggttatgttgatacacctaataatacagatttttccagagttagtgctaaaccaccgcctggagatcaatttaaacacctcataccacttatgtacaaaggacttccttggaatgtagtgcgtataaagattgtacaaatgttaagtgacacacttaaaaatctctctgacagagtcgtatttgtcttatgggcacatggctttgagttgacatctatgaagtattttgtgaaaataggacctgagcgcacctgttgtctatgtgatagacgtgccacatgcttttccactgcttcagacacttatgcctgttggcatcattctattggatttgattacgtctataatccgtttatgattgatgttcaacaatggggttttacaggtaacctacaaagcaaccatgatctgtattgtcaagtccatggtaatgcacatgtagctagttgtgatgcaatcatgactaggtgtctagctgtccacgagtgctttgttaagcgtgttgactggactattgaatatcctataattggtgatgaactgaagattaatgcggcttgtagaaaggttcaacacatggttgttaaagctgcattattagcagacaaattcccagttcttcacgacattggtaaccctaaagctattaagtgtgtacctcaagctgatgtagaatggaagttctatgatgcacagccttgtagtgacaaagcttataaaatagaagaattattctattcttatgccacacattctgacaaattcacagatggtgtatgcctattttggaattgcaatgtcgatagatatcctgctaattccattgtttgtagatttgacactagagtgctatctaaccttaacttgcctggttgtgatggtggcagtttgtatgtaaataaacatgcattccacacaccagcttttgataaaagtgcttttgttaatttaaaacaattaccatttttctattactctgacagtccatgtgagtctcatggaaaacaagtagtgtcagatatagattatgtaccactaaagtctgctacgtgtataacacgttgcaatttaggtggtgctgtctgtagacatcatgctaatgagtacagattgtatctcgatgcttataacatgatgatctcagctggctttagcttgtgggtttacaaacaatttgatacttataacctctggaacacttttacaagacttcagagtttagaaaatgtggcttttaatgttgtaaataagggacactttgatggacaacagggtgaagtaccagtttctatcattaataacactgtttacacaaaagttgatggtgttgatgtagaattgtttgaaaataaaacaacattacctgttaatgtagcatttgagctttgggctaagcgcaacattaaaccagtaccagaggtgaaaatactcaataatttgggtgtggacattgctgctaatactgtgatctgggactacaaaagagatgctccagcacatatatctactattggtgtttgttctatgactgacatagccaagaaaccaactgaaacgatttgtgcaccactcactgtcttttttgatggtagagttgatggtcaagtagacttatttagaaatgcccgtaatggtgttcttattacagaaggtagtgttaaaggtttacaaccatctgtaggtcccaaacaagctagtcttaatggagtcacattaattggagaagccgtaaaaacacagttcaattattataagaaagttgatggtgttgtccaacaattacctgaaacttactttactcagagtagaaatttacaagaatttaaacccaggagtcaaatggaaattgatttcttagaattagctatggatgaattcattgaacggtataaattagaaggctatgccttcgaacatatcgtttatggagattttagtcatagtcagttaggtggtttacatctactgattggactagctaaacgttttaaggaatcaccttttgaattagaagattttattcctatggacagtacagttaaaaactatttcataacagatgcgcaaacaggttcatctaagtgtgtgtgttctgttattgatttattacttgatgattttgttgaaataataaaatcccaagatttatctgtagtttctaaggttgtcaaagtgactattgactatacagaaatttcatttatgctttggtgtaaagatggccatgtagaaacattttacccaaaattacaatctagtcaagcgtggcaaccgggtgttgctatgcctaatctttacaaaatgcaaagaatgctattagaaaagtgtgaccttcaaaattatggtgatagtgcaacattacctaaaggcataatgatgaatgtcgcaaaatatactcaactgtgtcaatatttaaacacattaacattagctgtaccctataatatgagagttatacattttggtgctggttctgataaaggagttgcaccaggtacagctgttttaagacagtggttgcctacgggtacgctgcttgtcgattcagatcttaatgactttgtctctgatgcagattcaactttgattggtgattgtgcaactgtacatacagctaataaatgggatctcattattagtgatatgtacgaccctaagactaaaaatgttacaaaagaaaatgactctaaagagggttttttcacttacatttgtgggtttatacaacaaaagctagctcttggaggttccgtggctataaagataacagaacattcttggaatgctgatctttataagctcatgggacacttcgcatggtggacagcctttgttactaatgtgaatgcgtcatcatctgaagcatttttaattggatgtaattatcttggcaaaccacgcgaacaaatagatggttatgtcatgcatgcaaattacatattttggaggaatacaaatccaattcagttgtcttcctattctttatttgacatgagtaaatttccccttaaattaaggggtactgctgttatgtctttaaaagaaggtcaaatcaatgatatgattttatctcttcttagtaaaggtagacttataattagagaaaacaacagagttgttatttctagtgatgttcttgttaacaactaaacgaacaatgtttgtttttcttgttttattgccactagtctctagtcagtgtgttaatcttacaaccagaactcaattaccccctgcatacactaattctttcacacgtggtgtttattaccctgacaaagttttcagatcctcagttttacattcaactcaggacttgttcttacctttcttttccaatgttacttggttccatgctatacatgtctctgggaccaatggtactaagaggtttgataaccctgtcctaccatttaatgatggtgtttattttgcttccactgagaagtctaacataataagaggctggatttttggtactactttagattcgaagacccagtccctacttattgttaataacgctactaatgttgttattaaagtctgtgaatttcaattttgtaatgatccatttttgggtgtttattaccacaaaaacaacaaaagttggatggaaagtgagttcagagtttattctagtgcgaataattgcacttttgaatatgtctctcagccttttcttatggaccttgaaggaaaacagggtaatttcaaaaatcttagggaatttgtgtttaagaatattgatggttattttaaaatatattctaagcacacgcctattaatttagtgcgtgatctccctcagggtttttcggctttagaaccattggtagatttgccaataggtattaacatcactaggtttcaaactttacttgctttacatagaagttatttgactcctggtgattcttcttcaggttggacagctggtgctgcagcttattatgtgggttatcttcaacctaggacttttctattaaaatataatgaaaatggaaccattacagatgctgtagactgtgcacttgaccctctctcagaaacaaagtgtacgttgaaatccttcactgtagaaaaaggaatctatcaaacttctaactttagagtccaaccaacagaatctattgttagatttcctaatattacaaacttgtgcccttttggtgaagtttttaacgccaccagatttgcatctgtttatgcttggaacaggaagagaatcagcaactgtgttgctgattattctgtcctatataattccgcatcattttccacttttaagtgttatggagtgtctcctactaaattaaatgatctctgctttactaatgtctatgcagattcatttgtaattagaggtgatgaagtcagacaaatcgctccagggcaaactggaaagattgctgattataattataaattaccagatgattttacaggctgcgttatagcttggaattctaacaatcttgattctaaggttggtggtaattataattacctgtatagattgtttaggaagtctaatctcaaaccttttgagagagatatttcaactgaaatctatcaggccggtagcacaccttgtaatggtgttgaaggttttaattgttactttcctttacaatcatatggtttccaacccactaatggtgttggttaccaaccatacagagtagtagtactttcttttgaacttctacatgcaccagcaactgtttgtggacctaaaaagtctactaatttggttaaaaacaaatgtgtcaatttcaacttcaatggtttaacaggcacaggtgttcttactgagtctaacaaaaagtttctgcctttccaacaatttggcagagacattgctgacactactgatgctgtccgtgatccacagacacttgagattcttgacattacaccatgttcttttggtggtgtcagtgttataacaccaggaacaaatacttctaaccaggttgctgttctttatcaggatgttaactgcacagaagtccctgttgctattcatgcagatcaacttactcctacttggcgtgtttattctacaggttctaatgtttttcaaacacgtgcaggctgtttaataggggctgaacatgtcaacaactcatatgagtgtgacatacccattggtgcaggtatatgcgctagttatcagactcagactaattctcctcggcgggcacgtagtgtagctagtcaatccatcattgcctacactatgtcacttggtgcagaaaattcagttgcttactctaataactctattgccatacccacaaattttactattagtgttaccacagaaattctaccagtgtctatgaccaagacatcagtagattgtacaatgtacatttgtggtgattcaactgaatgcagcaatcttttgttgcaatatggcagtttttgtacacaattaaaccgtgctttaactggaatagctgttgaacaagacaaaaacacccaagaagtttttgcacaagtcaaacaaatttacaaaacaccaccaattaaagattttggtggttttaatttttcacaaatattaccagatccatcaaaaccaagcaagaggtcatttattgaagatctacttttcaacaaagtgacacttgcagatgctggcttcatcaaacaatatggtgattgccttggtgatattgctgctagagacctcatttgtgcacaaaagtttaacggccttactgttttgccacctttgctcacagatgaaatgattgctcaatacacttctgcactgttagcgggtacaatcacttctggttggacctttggtgcaggtgctgcattacaaataccatttgctatgcaaatggcttataggtttaatggtattggagttacacagaatgttctctatgagaaccaaaaattgattgccaaccaatttaatagtgctattggcaaaattcaagactcactttcttccacagcaagtgcacttggaaaacttcaagatgtggtcaaccaaaatgcacaagctttaaacacgcttgttaaacaacttagctccaattttggtgcaatttcaagtgttttaaatgatatcctttcacgtcttgacaaagttgaggctgaagtgcaaattgataggttgatcacaggcagacttcaaagtttgcagacatatgtgactcaacaattaattagagctgcagaaatcagagcttctgctaatcttgctgctactaaaatgtcagagtgtgtacttggacaatcaaaaagagttgatttttgtggaaagggctatcatcttatgtccttccctcagtcagcacctcatggtgtagtcttcttgcatgtgacttatgtccctgcacaagaaaagaacttcacaactgctcctgccatttgtcatgatggaaaagcacactttcctcgtgaaggtgtctttgtttcaaatggcacacactggtttgtaacacaaaggaatttttatgaaccacaaatcattactacagacaacacatttgtgtctggtaactgtgatgttgtaataggaattgtcaacaacacagtttatgatcctttgcaacctgaattagactcattcaaggaggagttagataaatattttaagaatcatacatcaccagatgttgatttaggtgacatctctggcattaatgcttcagttgtaaacattcaaaaagaaattgaccgcctcaatgaggttgccaagaatttaaatgaatctctcatcgatctccaagaacttggaaagtatgagcagtatataaaatggccatggtacatttggctaggttttatagctggcttgattgccatagtaatggtgacaattatgctttgctgtatgaccagttgctgtagttgtctcaagggctgttgttcttgtggatcctgctgcaaatttgatgaagacgactctgagccagtgctcaaaggagtcaaattacattacacataaacgaacttatggatttgtttatgagaatcttcacaattggaactgtaactttgaagcaaggtgaaatcaaggatgctactccttcagattttgttcgcgctactgcaacgataccgatacaagcctcactccctttcggatggcttattgttggcgttgcacttcttgctgtttttcagagcgcttccaaaatcataaccctcaaaaagagatggcaactagcactctccaagggtgttcactttgtttgcaacttgctgttgttgtttgtaacagtttactcacaccttttgctcgttgctgctggccttgaagccccttttctctatctttatgctttagtctacttcttgcagagtataaactttgtaagaataataatgaggctttggctttgctggaaatgccgttccaaaaacccattactttatgatgccaactattttctttgctggcatactaattgttacgactattgtataccttacaatagtgtaacttcttcaattgtcattacttcaggtgatggcacaacaagtcctatttctgaacatgactaccagattggtggttatactgaaaaatgggaatctggagtaaaagactgtgttgtattacacagttacttcacttcagactattaccagctgtactcaactcaattgagtacagacactggtgttgaacatgttaccttcttcatctacaataaaattttgatgagcctgaagaacatgtccaaattcacacaatcgacggttcatccggagttgttaatccagtaatggaaccaatttatgatgaaccgacgacgactactagcgtgcctttgtaagcacaagctgatgagtacgaacttatgtactcattcgtttcggaagagacaggtacgttaatagttaatagcgtacttctttttcttgctttcgtggtattcttgctagttacactagccatccttactgcgcttcgattgtgtgcgtactgctgcaatattgttaacgtgagtcttgtaaaaccttctttttacgtttactctcgtgttaaaaatctgaattcttctagagttcctgatcttctggtctaaacgaactaaatattatattagtttttctgtttggaactttaattttagccatggcagattccaacggtactattaccgttgaagagcttaaaaagctccttgaacaatggaacctagtaataggtttcctattccttacatggatttgtcttctacaatttgcctatgccaacaggaataggtttttgtatataattaagttaattttcctctggctgttatggccagtaactttagcttgttttgtgcttgctgctgtttacagaataaattggatcaccggtggaattgctatcgcaatggcttgtcttgtaggcttgatgtggctcagctacttcattgcttctttcagactgtttgcgcgtacgcgttccatgtggtcattcaatccagaaactaacattcttctcaacgtgccactccatggcactattctgaccagaccgcttctagaaagtgaactcgtaatcggagctgtgatccttcgtggacatcttcgtattgctggacaccatctaggacgctgtgacatcaaggacctgcctaaagaaatcactgttgctacatcacgaacgctttcttattacaaattgggagcttcgcagcgtgtagcaggtgactcaggttttgctgcatacagtcgctacaggattggcaactataaattaaacacagaccattccagtagcagtgacaatattgctttgcttgtacagtaagtgacaacagatgtttcatctcgttgactttcaggttactatagcagagatattactaattattatgaggacttttaaagtttccatttggaatcttgattacatcataaacctcataattaaaaatttatctaagtcactaactgagaataaatattctcaattagatgaagagcaaccaatggagattgattaaacgaacatgaaaattattcttttcttggcactgataacactcgctacttgtgagctttatcactaccaagagtgtgttagaggtacaacagtacttttaaaagaaccttgctcttctggaacatacgagggcaattcaccatttcatcctctagctgataacaaatttgcactgacttgctttagcactcaatttgcttttgcttgtcctgacggcgtaaaacacgtctatcagttacgtgccagatcagtttcacctaaactgttcatcagacaagaggaagttcaagaactttactctccaatttttcttattgttgcggcaatagtgtttataacactttgcttcacactcaaaagaaagacagaatgattgaactttcattaattgacttctatttgtgctttttagcctttctgctattccttgttttaattatgcttattatcttttggttctcacttgaactgcaagatcataatgaaacttgtcacgcctaaacgaacatgaaatttcttgttttcttaggaatcatcacaactgtagctgcatttcaccaagaatgtagtttacagtcatgtactcaacatcaaccatatgtagttgatgacccgtgtcctattcacttctattctaaatggtatattagagtaggagctagaaaatcagcacctttaattgaattgtgcgtggatgaggctggttctaaatcacccattcagtacatcgatatcggtaattatacagtttcctgtttaccttttacaattaattgccaggaacctaaattgggtagtcttgtagtgcgttgttcgttctatgaagactttttagagtatcatgacgttcgtgttgttttagatttcatctaaacgaacaaactaaaatgtctgataatggaccccaaaatcagcgaaatgcaccccgcattacgtttggtggaccctcagattcaactggcagtaaccagaatggagaacgcagtggggcgcgatcaaaacaacgtcggccccaaggtttacccaataatactgcgtcttggttcaccgctctcactcaacatggcaaggaagaccttaaattccctcgaggacaaggcgttccaattaacaccaatagcagtccagatgaccaaattggctactaccgaagagctaccagacgaattcgtggtggtgacggtaaaatgaaagatctcagtccaagatggtatttctactacctaggaactgggccagaagctggacttccctatggtgctaacaaagacggcatcatatgggttgcaactgagggagccttgaatacaccaaaagatcacattggcacccgcaatcctgctaacaatgctgcaatcgtgctacaacttcctcaaggaacaacattgccaaaaggcttctacgcagaagggagcagaggcggcagtcaagcctcttctcgttcctcatcacgtagtcgcaacagttcaagaaattcaactccaggcagcagtaggggaacttctcctgctagaatggctggcaatggcggtgatgctgctcttgctttgctgctgcttgacagattgaaccagcttgagagcaaaatgtctggtaaaggccaacaacaacaaggccaaactgtcactaagaaatctgctgctgaggcttctaagaagcctcggcaaaaacgtactgccactaaagcatacaatgtaacacaagctttcggcagacgtggtccagaacaaacccaaggaaattttggggaccaggaactaatcagacaaggaactgattacaaacattggccgcaaattgcacaatttgcccccagcgcttcagcgttcttcggaatgtcgcgcattggcatggaagtcacaccttcgggaacgtggttgacctacacaggtgccatcaaattggatgacaaagatccaaatttcaaagatcaagtcattttgctgaataagcatattgacgcatacaaaacattcccaccaacagagcctaaaaaggacaaaaagaagaaggctgatgaaactcaagccttaccgcagagacagaagaaacagcaaactgtgactcttcttcctgctgcagatttggatgatttctccaaacaattgcaacaatccatgagcagtgctgactcaactcaggcctaaactcatgcagaccacacaaggcagatgggctatataaacgttttcgcttttccgtttacgatatatagtctactcttgtgcagaatgaattctcgtaactacatagcacaagtagatgtagttaactttaatctcacatagcaatctttaatcagtgtgtaacattagggaggacttgaaagagccaccacattttcaccgaggccacgcggagtacgatcgagtgtacagtgaacaatgctagggagagctgcctatatggaagagccctaatgtgtaaaattaattttagtagtgctatccccatgtgattttaatagcttcttaggagaatgacaaaaaaaaaaaaaaaaaaaaaaaaaaaaaaaaa

SEQ ID NO: 8 - DNA, 29903 bp, Severe acute respiratory syndrome coronavirus 2
tttttttttttttttttttttttttttttttttgtcattctcctaagaagctattaaaatcacatggggatagcactactaaaattaattttacacattagggctcttccatataggcagctctccctagcattgttcactgtacactcgatcgtactccgcgtggcctcggtgaaaatgtggtggctctttcaagtcctccctaatgttacacactgattaaagattgctatgtgagattaaagttaactacatctacttgtgctatgtagttacgagaattcattctgcacaagagtagactatatatcgtaaacggaaaagcgaaaacgtttatatagcccatctgccttgtgtggtctgcatgagtttaggcctgagttgagtcagcactgctcatggattgttgcaattgtttggagaaatcatccaaatctgcagcaggaagaagagtcacagtttgctgtttcttctgtctctgcggtaaggcttgagtttcatcagccttcttctttttgtcctttttaggctctgttggtgggaatgttttgtatgcgtcaatatgcttattcagcaaaatgacttgatctttgaaatttggatctttgtcatccaatttgatggcacctgtgtaggtcaaccacgttcccgaaggtgtgacttccatgccaatgcgcgacattccgaagaacgctgaagcgctgggggcaaattgtgcaatttgcggccaatgtttgtaatcagttccttgtctgattagttcctggtccccaaaatttccttgggtttgttctggaccacgtctgccgaaagcttgtgttacattgtatgctttagtggcagtacgtttttgccgaggcttcttagaagcctcagcagcagatttcttagtgacagtttggccttgttgttgttggcctttaccagacattttgctctcaagctggttcaatctgtcaagcagcagcaaagcaagagcagcatcaccgccattgccagccattctagcaggagaagttcccctactgctgcctggagttgaatttcttgaactgttgcgactacgtgatgaggaacgagaagaggcttgactgccgcctctgctcccttctgcgtagaagccttttggcaatgttgttccttgaggaagttgtagcacgattgcagcattgttagcaggattgcgggtgccaatgtgatcttttggtgtattcaaggctccctcagttgcaacccatatgatgccgtctttgttagcaccatagggaagtccagcttctggcccagttcctaggtagtagaaataccatcttggactgagatctttcattttaccgtcaccaccacgaattcgtctggtagctcttcggtagtagccaatttggtcatctggactgctattggtgttaattggaacgccttgtcctcgagggaatttaaggtcttccttgccatgttgagtgagagcggtgaaccaagacgcagtattattgggtaaaccttggggccgacgttgttttgatcgcgccccactgcgttctccattctggttactgccagttgaatctgagggtccaccaaacgtaatgcggggtgcatttcgctgattttggggtccattatcagacattttagtttgttcgtttagatgaaatctaaaacaacacgaacgtcatgatactctaaaaagtcttcatagaacgaacaacgcactacaagactacccaatttaggttcctggcaattaattgtaaaaggtaaacaggaaactgtataattaccgatatcgatgtactgaatgggtgatttagaaccagcctcatccacgcacaattcaattaaaggtgctgattttctagctcctactctaatataccatttagaatagaagtgaataggacacgggtcatcaactacatatggttgatgttgagtacatgactgtaaactacattcttggtgaaatgcagctacagttgtgatgattcctaagaaaacaagaaatttcatgttcgtttaggcgtgacaagtttcattatgatcttgcagttcaagtgagaaccaaaagataataagcataattaaaacaaggaatagcagaaaggctaaaaagcacaaatagaagtcaattaatgaaagttcaatcattctgtctttcttttgagtgtgaagcaaagtgttataaacactattgccgcaacaataagaaaaattggagagtaaagttcttgaacttcctcttgtctgatgaacagtttaggtgaaactgatctggcacgtaactgatagacgtgttttacgccgtcaggacaagcaaaagcaaattgagtgctaaagcaagtcagtgcaaatttgttatcagctagaggatgaaatggtgaattgccctcgtatgttccagaagagcaaggttcttttaaaagtactgttgtacctctaacacactcttggtagtgataaagctcacaagtagcgagtgttatcagtgccaagaaaagaataattttcatgttcgtttaatcaatctccattggttgctcttcatctaattgagaatatttattctcagttagtgacttagataaatttttaattatgaggtttatgatgtaatcaagattccaaatggaaactttaaaagtcctcataataattagtaatatctctgctatagtaacctgaaagtcaacgagatgaaacatctgttgtcacttactgtacaagcaaagcaatattgtcactgctactggaatggtctgtgtttaatttatagttgccaatcctgtagcgactgtatgcagcaaaacctgagtcacctgctacacgctgcgaagctcccaatttgtaataagaaagcgttcgtgatgtagcaacagtgatttctttaggcaggtccttgatgtcacagcgtcctagatggtgtccagcaatacgaagatgtccacgaaggatcacagctccgattacgagttcactttctagaagcggtctggtcagaatagtgccatggagtggcacgttgagaagaatgttagtttctggattgaatgaccacatggaacgcgtacgcgcaaacagtctgaaagaagcaatgaagtagctgagccacatcaagcctacaagacaagccattgcgatagcaattccaccggtgatccaatttattctgtaaacagcagcaagcacaaaacaagctaaagttactggccataacagccagaggaaaattaacttaattatatacaaaaacctattcctgttggcataggcaaattgtagaagacaaatccatgtaaggaataggaaacctattactaggttccattgttcaaggagctttttaagctcttcaacggtaatagtaccgttggaatctgccatggctaaaattaaagttccaaacagaaaaactaatataatatttagttcgtttagaccagaagatcaggaactctagaagaattcagatttttaacacgagagtaaacgtaaaaagaaggttttacaagactcacgttaacaatattgcagcagtacgcacacaatcgaagcgcagtaaggatggctagtgtaactagcaagaataccacgaaagcaagaaaaagaagtacgctattaactattaacgtacctgtctcttccgaaacgaatgagtacataagttcgtactcatcagcttgtgcttacaaaggcacgctagtagtcgtcgtcggttcatcataaattggttccattactggattaacaactccggatgaaccgtcgattgtgtgaatttggacatgttcttcaggctcatcaacaattttattgtagatgaagaaggtaacatgttcaacaccagtgtctgtactcaattgagttgagtacagctggtaatagtctgaagtgaagtaactgtgtaatacaacacagtcttttactccagattcccatttttcagtataaccaccaatctggtagtcatgttcagaaataggacttgttgtgccatcacctgaagtaatgacaattgaagaagttacactattgtaaggtatacaatagtcgtaacaattagtatgccagcaaagaaaatagttggcatcataaagtaatgggtttttggaacggcatttccagcaaagccaaagcctcattattattcttacaaagtttatactctgcaagaagtagactaaagcataaagatagagaaaaggggcttcaaggccagcagcaacgagcaaaaggtgtgagtaaactgttacaaacaacaacagcaagttgcaaacaaagtgaacacccttggagagtgctagttgccatctctttttgagggttatgattttggaagcgctctgaaaaacagcaagaagtgcaacgccaacaataagccatccgaaagggagtgaggcttgtatcggtatcgttgcagtagcgcgaacaaaatctgaaggagtagcatccttgatttcaccttgcttcaaagttacagttccaattgtgaagattctcataaacaaatccataagttcgtttatgtgtaatgtaatttgactcctttgagcactggctcagagtcgtcttcatcaaatttgcagcaggatccacaagaacaacagcccttgagacaactacagcaactggtcatacagcaaagcataattgtcaccattactatggcaatcaagccagctataaaacctagccaaatgtaccatggccattttatatactgctcatactttccaagttcttggagatcgatgagagattcatttaaattcttggcaacctcattgaggcggtcaatttctttttgaatgtttacaactgaagcattaatgccagagatgtcacctaaatcaacatctggtgatgtatgattcttaaaatatttatctaactcctccttgaatgagtctaattcaggttgcaaaggatcataaactgtgttgttgacaattcctattacaacatcacagttaccagacacaaatgtgttgtctgtagtaatgatttgtggttcataaaaattcctttgtgttacaaaccagtgtgtgccatttgaaacaaagacaccttcacgaggaaagtgtgcttttccatcatgacaaatggcaggagcagttgtgaagttcttttcttgtgcagggacataagtcacatgcaagaagactacaccatgaggtgctgactgagggaaggacataagatgatagccctttccacaaaaatcaactctttttgattgtccaagtacacactctgacattttagtagcagcaagattagcagaagctctgatttctgcagctctaattaattgttgagtcacatatgtctgcaaactttgaagtctgcctgtgatcaacctatcaatttgcacttcagcctcaactttgtcaagacgtgaaaggatatcatttaaaacacttgaaattgcaccaaaattggagctaagttgtttaacaagcgtgtttaaagcttgtgcattttggttgaccacatcttgaagttttccaagtgcacttgctgtggaagaaagtgagtcttgaattttgccaatagcactattaaattggttggcaatcaatttttggttctcatagagaacattctgtgtaactccaataccattaaacctataagccatttgcatagcaaatggtatttgtaatgcagcacctgcaccaaaggtccaaccagaagtgattgtacccgctaacagtgcagaagtgtattgagcaatcatttcatctgtgagcaaaggtggcaaaacagtaaggccgttaaacttttgtgcacaaatgaggtctctagcagcaatatcaccaaggcaatcaccatattgtttgatgaagccagcatctgcaagtgtcactttgttgaaaagtagatcttcaataaatgacctcttgcttggttttgatggatctggtaatatttgtgaaaaattaaaaccaccaaaatctttaattggtggtgttttgtaaatttgtttgacttgtgcaaaaacttcttgggtgtttttgtcttgttcaacagctattccagttaaagcacggtttaattgtgtacaaaaactgccatattgcaacaaaagattgctgcattcagttgaatcaccacaaatgtacattgtacaatctactgatgtcttggtcatagacactggtagaatttctgtggtaacactaatagtaaaatttgtgggtatggcaatagagttattagagtaagcaactgaattttctgcaccaagtgacatagtgtaggcaatgatggattgactagctacactacgtgcccgccgaggagaattagtctgagtctgataactagcgcatatacctgcaccaatgggtatgtcacactcatatgagttgttgacatgttcagcccctattaaacagcctgcacgtgtttgaaaaacattagaacctgtagaataaacacgccaagtaggagtaagttgatctgcatgaatagcaacagggacttctgtgcagttaacatcctgataaagaacagcaacctggttagaagtatttgttcctggtgttataacactgacaccaccaaaagaacatggtgtaatgtcaagaatctcaagtgtctgtggatcacggacagcatcagtagtgtcagcaatgtctctgccaaattgttggaaaggcagaaactttttgttagactcagtaagaacacctgtgcctgttaaaccattgaagttgaaattgacacatttgtttttaaccaaattagtagactttttaggtccacaaacagttgctggtgcatgtagaagttcaaaagaaagtactactactctgtatggttggtaaccaacaccattagtgggttggaaaccatatgattgtaaaggaaagtaacaattaaaaccttcaacaccattacaaggtgtgctaccggcctgatagatttcagttgaaatatctctctcaaaaggtttgagattagacttcctaaacaatctatacaggtaattataattaccaccaaccttagaatcaagattgttagaattccaagctataacgcagcctgtaaaatcatctggtaatttataattataatcagcaatctttccagtttgccctggagcgatttgtctgacttcatcacctctaattacaaatgaatctgcatagacattagtaaagcagagatcatttaatttagtaggagacactccataacacttaaaagtggaaaatgatgcggaattatataggacagaataatcagcaacacagttgctgattctcttcctgttccaagcataaacagatgcaaatctggtggcgttaaaaacttcaccaaaagggcacaagtttgtaatattaggaaatctaacaatagattctgttggttggactctaaagttagaagtttgatagattcctttttctacagtgaaggatttcaacgtacactttgtttctgagagagggtcaagtgcacagtctacagcatctgtaatggttccattttcattatattttaatagaaaagtcctaggttgaagataacccacataataagctgcagcaccagctgtccaacctgaagaagaatcaccaggagtcaaataacttctatgtaaagcaagtaaagtttgaaacctagtgatgttaatacctattggcaaatctaccaatggttctaaagccgaaaaaccctgagggagatcacgcactaaattaataggcgtgtgcttagaatatattttaaaataaccatcaatattcttaaacacaaattccctaagatttttgaaattaccctgttttccttcaaggtccataagaaaaggctgagagacatattcaaaagtgcaattattcgcactagaataaactctgaactcactttccatccaacttttgttgtttttgtggtaataaacacccaaaaatggatcattacaaaattgaaattcacagactttaataacaacattagtagcgttattaacaataagtagggactgggtcttcgaatctaaagtagtaccaaaaatccagcctcttattatgttagacttctcagtggaagcaaaataaacaccatcattaaatggtaggacagggttatcaaacctcttagtaccattggtcccagagacatgtatagcatggaaccaagtaacattggaaaagaaaggtaagaacaagtcctgagttgaatgtaaaactgaggatctgaaaactttgtcagggtaataaacaccacgtgtgaaagaattagtgtatgcagggggtaattgagttctggttgtaagattaacacactgactagagactagtggcaataaaacaagaaaaacaaacattgttcgtttagttgttaacaagaacatcactagaaataacaactctgttgttttctctaattataagtctacctttactaagaagagataaaatcatatcattgatttgaccttcttttaaagacataacagcagtaccccttaatttaaggggaaatttactcatgtcaaataaagaataggaagacaactgaattggatttgtattcctccaaaatatgtaatttgcatgcatgacataaccatctatttgttcgcgtggtttgccaagataattacatccaattaaaaatgcttcagatgatgacgcattcacattagtaacaaaggctgtccaccatgcgaagtgtcccatgagcttataaagatcagcattccaagaatgttctgttatctttatagccacggaacctccaagagctagcttttgttgtataaacccacaaatgtaagtgaaaaaaccctctttagagtcattttcttttgtaacatttttagtcttagggtcgtacatatcactaataatgagatcccatttattagctgtatgtacagttgcacaatcaccaatcaaagttgaatctgcatcagagacaaagtcattaagatctgaatcgacaagcagcgtacccgtaggcaaccactgtcttaaaacagctgtacctggtgcaactcctttatcagaaccagcaccaaaatgtataactctcatattatagggtacagctaatgttaatgtgtttaaatattgacacagttgagtatattttgcgacattcatcattatgcctttaggtaatgttgcactatcaccataattttgaaggtcacacttttctaatagcattctttgcattttgtaaagattaggcatagcaacacccggttgccacgcttgactagattgtaattttgggtaaaatgtttctacatggccatctttacaccaaagcataaatgaaatttctgtatagtcaatagtcactttgacaaccttagaaactacagataaatcttgggattttattatttcaacaaaatcatcaagtaataaatcaataacagaacacacacacttagatgaacctgtttgcgcatctgttatgaaatagtttttaactgtactgtccataggaataaaatcttctaattcaaaaggtgattccttaaaacgtttagctagtccaatcagtagatgtaaaccacctaactgactatgactaaaatctccataaacgatatgttcgaaggcatagccttctaatttataccgttcaatgaattcatccatagctaattctaagaaatcaatttccatttgactcctgggtttaaattcttgtaaatttctactctgagtaaagtaagtttcaggtaattgttggacaacaccatcaactttcttataataattgaactgtgtttttacggcttctccaattaatgtgactccattaagactagcttgtttgggacctacagatggttgtaaacctttaacactaccttctgtaataagaacaccattacgggcatttctaaataagtctacttgaccatcaactctaccatcaaaaaagacagtgagtggtgcacaaatcgtttcagttggtttcttggctatgtcagtcatagaacaaacaccaatagtagatatatgtgctggagcatctcttttgtagtcccagatcacagtattagcagcaatgtccacacccaaattattgagtattttcacctctggtactggtttaatgttgcgcttagcccaaagctcaaatgctacattaacaggtaatgttgttttattttcaaacaattctacatcaacaccatcaacttttgtgtaaacagtgttattaatgatagaaactggtacttcaccctgttgtccatcaaagtgtcccttatttacaacattaaaagccacattttctaaactctgaagtcttgtaaaagtgttccagaggttataagtatcaaattgtttgtaaacccacaagctaaagccagctgagatcatcatgttataagcatcgagatacaatctgtactcattagcatgatgtctacagacagcaccacctaaattgcaacgtgttatacacgtagcagactttagtggtacataatctatatctgacactacttgttttccatgagactcacatggactgtcagagtaatagaaaaatggtaattgttttaaattaacaaaagcacttttatcaaaagctggtgtgtggaatgcatgtttatttacatacaaactgccaccatcacaaccaggcaagttaaggttagatagcactctagtgtcaaatctacaaacaatggaattagcaggatatctatcgacattgcaattccaaaataggcatacaccatctgtgaatttgtcagaatgtgtggcataagaatagaataattcttctattttataagctttgtcactacaaggctgtgcatcatagaacttccattctacatcagcttgaggtacacacttaatagctttagggttaccaatgtcgtgaagaactgggaatttgtctgctaataatgcagctttaacaaccatgtgttgaacctttctacaagccgcattaatcttcagttcatcaccaattataggatattcaatagtccagtcaacacgcttaacaaagcactcgtggacagctagacacctagtcatgattgcatcacaactagctacatgtgcattaccatggacttgacaatacagatcatggttgctttgtaggttacctgtaaaaccccattgttgaacatcaatcataaacggattatagacgtaatcaaatccaatagaatgatgccaacaggcataagtgtctgaagcagtggaaaagcatgtggcacgtctatcacatagacaacaggtgcgctcaggtcctattttcacaaaatacttcatagatgtcaactcaaagccatgtgcccataagacaaatacgactctgtcagagagatttttaagtgtgtcacttaacatttgtacaatctttatacgcactacattccaaggaagtcctttgtacataagtggtatgaggtgtttaaattgatctccaggcggtggtttagcactaactctggaaaaatctgtattattaggtgtatcaacataacctgtaggtacagcaactaggttaacacctgtagaaaaacctagctgtaaaggtaaattggtaccaacagcttctctagtagcatgacacccctcgacatcgaagccaatccatgcacgtacatgtcttatagcttcttcgcgggtgataaacatgttagggtaaccattaacttgataattcattttaaaacccatcatagagatgagtcttctataggtcatgtccttaggtatgccaggtatgtcaacacataaaccttcagttttgaatttagtgtcaacactgaggtgtgtaggtgcctgtgtaggatgtaacccagtgattaccttactacaatctttaaagagtcctgttacattttcagcttgtaaagttgccacattcctacgtggaatttcaagacttgtaaattgcaacttgtcataaaggtctctatcagacattatgcaaagtatgcctacttttgctctggtaatagcaacattaaatctgtttacattacaagagtgagctgtttcagtggtttgagtgaatatgacatagtcatattctgagccctgtgatgaatcaacagtttgagttggtagtcccaaaatctttgaggctacagcattctgtgaattataaggtgaaataaagacagcttttctccaagcagggttacgtgtaaggaattctcttaccacgcctatttgtggcctgttaattgcagatgaaacatcatgcgtgataacacccttataaaacattttaaagcattgagctgatttgtctttatgtgctttaagcttattatcataaaccaaagcactcacagtgtcaacaatttcagcaggacaacgccgacaagttccgaggaacatgtctggacctatagttttcataagtctacacactgaattgaaatattctggttctagtgtgcccttagttagcaatgtgcgtggtgcaggtaattgagcagggtcgccaatgtacacatagtgcttagcacgtaatctggcattgacaacactcaaatcataatttgtggccattgaaatttcatcaaagacaactatatctgctgtcgtctcaggcaatgcatttacagtacaaaagacatactgttctaatgttgaattcactttgaatttatcaaaacactctacacgagcacgtgcaggtataattctactacatttatctataggcaaatattttaatgccttctcacatagtgcatcaacagcggcatgagagcaagctgtatacactatgcgagcagaagggtagtagagagctaggccaatagcaaaatgactcttaccagtaccaggtggtccctggagtgtagaatacttttgcataccaaccttttgataatttgcaacattgctagaaaactcatctgagatattgagtgttgggtataagccagtaattctaacatagtgctcttgtggcactagtgtaggtgcacttaatggcattactgtatgtgatgtcagcacaaaataatcaccaacatttaatttgtaagttgttgtacctcggtaaacaacagcatcaccatagtcacctttttcaaaggtgtactctcctatttgtactttactgtttttagttacacgataaccagtaaagacataatttcggttaagtggtggtctaggtttaccaacttcccatgaaagatgtaattctctgtcagacagcacttcacgtacagtagcaataccataagacagtttaaatgtctcctcagtagctttgagcgtttctgctgcaaaaagcttgagtctttcagtacaggtgttagctaaaatgtaatcaccagcatttgtccagtcacatgttgcaattgcattaaagtcagtaacattatcgctaccaacacatgtatttttatataaaccaaaaacttgtccattagcacacaatggaaaactaatgggtggtttatgtgatttacaataatagctcatacctcctaagtaaagttgagtcacatctgtgacatcacaacctggagcattgcaaacatacggattaacagacaagactaatttatgtgatgttgatatgacatggtcgtaacagcatttacaacataagaatggtctacgtatgcaagcaccacatcttaatgaagtctgtgaattgcaaagaacacaagccccaacagcctgtaagactgtatgcggtgtgtacatagcctcataaaactcaggttcccaataccttgaagtgttatcattagtaagcataacagaatacatgtctaacatgtgtcctgttaactcatcatgtagctttcttatgtattgtaagtacaaatgaaagacatcagcatactcctgattaggatgtttagtaagtgggtaagcatctatagctaaagacacgaaccgttcaatcataagtgtaccatctgtttttacgatatcatctacaaaacagccggcccctaggattcttgatggatctgggtaaggaaggtacacataatcatcaccctgtttaactagcattgtatgttgagagcaaaattcatgaggtcctttagtaaggtcagtctcagtccaacattttgcttcagacataaaaacattgttttgataataaagaactgacttaaagttctttatgctagccactagaccttgagatgcataagtgctattgaaacacacaacagcatcgtcagagagtatcatcattgagaaatgtttacgcaaatatgcgtaaaactcattcacaaagtctgtgtcaacatctctatttctatagagacactcataaagtctgtgttgtaaattgcggacatacttatcggcaattttgttaccatcagtagataaaagtgcattaacattggccgtgacagcttgacaaatgttaaaaacactattagcataagcagttgtggcatctcctgatgaggttccacctggtttaacatatagtgaaccgccacacatgaccatttcactcaatacttgagcacactcattagctaatctatagaaacggtgtgacaagctacaacacgttgtatgtttgcgagcaagaacaagtgaggccataattctaagcatgttaggcatggctctatcacatttaggataatcccaacccataaggtgagggttttctacatcactataaacagtttttaacatgttgtgccaaccaccatagaatttgcttgttccaattactacagtagctcctctagtggcggctattgatttcaataatttttgatgaaactgtctattggtcatagtactacagatagagacaccagctacggtgcgagctctattctttgcactaatggcatacttaagattcatttgagttatagtagggatgacattacgttttgtatatgcgaaaagtgcatcttgatcctcataactcattgaatcataataaagtctagccttaccccatttattaaatggaaaaccagctgatttgtctaggttgttgacgatgacttggttagcattaatacagccaccatcgtaacaatcaaagtacttatcaacaacttcaactacaaatagtagttgtctgatatcacacattgttggtagattataacgatagtagtcataatcgctgatagcagcattaccatcctgagcaaagaagaagtgttttaattcaacagaacttccttccttaaagaaacccttagacacagcaaagtcatagaagtctttgttaaaattaccgggtttgacagtttgaaaagcaacattgttagtaagtgcagctactgaaaagcacgtagtgcgtttatctagtaatagattaccagaagcagcgtgcatagcagggtcagcagcatacacaagtaattccttaaaactaagtctagagctatgtaagtttacatcctgattatgtacaacacctagctctctgaagtggtatccagttgaaactacaaatggaacaccatcaacaaatatttttctcactagtggtccaaaacttgtaggtgggaacactgtagagaataaaacattaaagtttgcacaatgcagaatgcatctgtcatccaaacagttaacacaatttgggtggtatgtctgatcccaatatttaaaataacggtcaaagagttttaacctctcttccgtgaagtcatattttaacaaatcccacttaatgtaaggctttgttaagtcagtgtcaacatgtgactctgcagttaaagccctggtcaaggttaatataggcattaacaatgaataataagaatctacaacaggaactccactacctggcgtggtttgtatgaaatcaccgaaatcataccagttaccattgagatcttgattatctaatgtcagtacaccaacaataccagcatttcgcatggcatcacagaattgtactgtttttaacaaagcttggcgtacacgttcacctaagttggcgtatacgcgtaatatatctgggttttctacaaaatcataccagtcctttttattgaaataatcatcatcacaacaattgtatgtgacaagtatttcttttaatgtgtcacaattaccttcatcaaaatgccttaaagcatagacgaggtctgccattgtgtatttagtaagacgttgacgtgatatatgtggtaccatgtcaccgtctattctaaacttaaagaagtcatgtttagcaacagctggacaatccttaagtaaattataaattgtttcttcatgttggtagttagagaaagtgtgtctcttaactacaaagtaagaatcaattaaattgtcatcttcgtccttttcttggaagcgacaacaattagtttttaggaatttagcaaaaccagctactttatcattgtagatgtcaaaagccctgtatacgacatcagtactagtgcctgtgccgcacggtgtaagacgggctgcacttacaccgcaaacccgtttaaaaacgattgtgcatcagctgactgaagcatgggttcgcggagttgatcacaactacagccataacctttccacataccgcagacggtacagactgtgtttttaagtgtaaaacccacagggtcattagcacaagttgtaggtatttgtacatacttaccttttaagtcacaaaatcctttaggatttggatgatctatgtggcaacggcagtacagacaacacgatgcaccaccaaaggattcttgatccatattggcttccggtgtaactgttattgcctgaccagtaccagtgtgtgtacacaacatcttaacacaattagtgattggttgtcccccactagctagataatctttgtaagctttagcagcatctacagcaaaagcacagaaagataatacagttgaattggcaggcacttctgttgcattaccagcttgtagacgtactgtggcagctaaactaccaagtaccatacctctatttaggttgtttaatcctttaataaagtataaatacttcactttaggacctttaggtgtgtctgtaacaaacctacaaggtggttccagttctgtatagatagtaccagttccatcactcttagggaatctagcccatttcaaatcctgtaaatcggataacagtgcaagtacaaacctacctccctttgttgtgttgtagtaagctaacgcattgtcatcagtgcaagcagtttgtgtagtaccggcagcacaagacatctgtcgtagtgcaacaggactaagctcattattctgtaatttgacagcagaattggcccttaaagctgttacaataagaggccatgctaaattaggtgaattgtccatactaatttcactaagttgaacaattttactatctgcatctacaacctgttggatttcccacaatgctgatgcataagtaaatgttgtaccatcacacgtatttttatatgtgttatagtctggtatgacaaccattagtttggctgctgttgtaagaggtattatgttcaagggaacacaaccatctcttgcattgttgataatgttgttgagtgcatcattatccaactttctaagcatagtgaaaagcattgtctgcatagcactagtaacttttgccctcttgtcctcagatctagcctgtttatacatttgggtcatagcttgatcagccatcttttccaacttacgttgcatggctgcatcacggtcaaattcagatttagccacattcaaagacttcttcaactttttaagaacaacttcagaatcaccattagcaacagcctgctcataagcttcttgagcagtagcaaaagctgcatatgatggaagggaactaaactctgaggctatagcttgtaaggttgccctgttgtccagcatttcttcacaaagcttgtttatgtctacagcaccctgcatggaaagcaaaacagaaagtagtgaaaccattttttcaaaggcttcagtagtatctttagctaagagaatgtcattgtgtaactggacacattgagcccacaatttagatgatgattctactctgagttgttgcaaaactgagagtaagactactgatgtgcactttacatctgacattttagactgtacagtggctactttgatacaaggtttgccaccaacacccaacaatttaatgttgagtttgaaggcatctatgctattcttgggtgggagtagtccctgtgaattcatatatctaaactcctgtgtagaaactaagtaatcataaacaccaagagtcagtctaaagtagcggttgagtaaacaaaagaggccaaagtaacaagtacaaaaatagcctaagaaacaataaactagcattatacactgaagtgtattaccagttatgaagaaaatagggcaatactcaacacacataaaaacaatacctctggccaaaaacatgacagttgtaactacacctgagtagttagaagtaacagagattataagagcccacatggaaatggcttgatctaaagcattaccataataaactttataaacgagtgtcaagacattcataagtgtccacactctcctagcaccatcatcatacacagttcttgctgtcataaggattagtaacactacagctgatgcatacataacacagtcttttagcttaaaaccagacaaactagtatcaaccatatccaaccatgtcataatacgcatcacccaactagcaggcatatagaccatattaaaataagctacagtggcaagagaaggtaacaaaaacaaacagagaaatgcatgcttatgtttgacaaacatcattgcaaaagcagacatagcaataatacccatagcaaaaggtaaaaaggcattttcatacaaaaaaaagaacaaagaccattgagtactctggactaaaactaaaagtgaagtcaaaattgtgagtaacaaccagtggtgtgtacccttgattgttcttttcactgcactttggaaagtaacacctgagcattgtctaacaacatcaaaaggtgtaaattcatcttctaataaagcactacccaatatggtacgtccattcataccattttgcagtaattcttttaatgaagcacacatatctaaaacggcaattccagtttgagcagaaagaggtcctagtatgtcaacatggtcttgtgttagaggttcataattgtacttcatagccacaaggttaaagtcattaagagttgtggtaaatcgattgagaaaccacctgtctccatttataacagcagcgtacaaccaagctaaaacattaactgtaatagttgtgtccgtaccagctgcttgtgctgtttgcctgtcaacaaaaggtccataaaagttaccttctaagtctgtgccagcatgaactccagttggtaattccatatggtgcatgtaacaaaaagagacacagtcataatctatgttaaaaccaacactaccacatgaaccattaaggaatgaacccttaatagtgaaattgggcctcatagcacattggtaaacaccagatggtgaaccattgtaacaagctaacactgaaaaagtctgtcctggttgaatgcgaacaaacttatacttaggtgtcttaggattggctgtatcaaccttaagcttaagtacacaattttgcatagaatgtccaataaccctgagttgaacattaccagcctgtaccaagaaattatgattagacttacgaatgagtaaatcttcataattagggttaagcatgtcttcagaggtgcagatcacatgtcttggacagtaaactacgtcatcaagccaaagaccgttaagtgtagttgtaccacaagttacttgtaccatacaaccctcaactttaccagatgggaatgccatttttctaaaaccactctgcaaaacagctgaggtgatagaggtttgtggtggttggtaaagaacatcagaacctgagttactgaagtcattgagagcctttgcgagatgacaacaagcagcttctctgtagctagttgtatccattgctccactaaaatacttgtacttattataaagagctaagtatctattatattgcgtaagaggtaatagcacatcactacgcaactttagatacatttctttatttaacaaaaaggtgcacagcgcagcttcttcaaaagtactaaaggaaacaccattaaagactacacgtctctttaggtaattactaaagaaccaatagaaatgctttgtggaaatacaaatgatataagcaattgttatccagaaaggtactaaaggtgtgaacataaccatccactgaatatgtgctaaaaaagaaacatcattagtaagataaaatgtcaagtacaagtaaataacagaataaacaccaggtaagaatgagtaaactggtgttaaacagagtacagtgaatgacataaggaatagtaaagtattaaaggcaactacatgactgtattcaccaaaagctcttctaaacctcataaaatagtaggcaaggcatgttactacgatagctacaataccaccagctactatagatgctgatatgtccaaagcaccaataggttgaattagtggtgtaaacatattagtaagtaaatttacagcatctacaccacagaaaactcctggtaaagatctgtaataatcattgttaagtacccatctaccactagtagatacacaaacaccagcttctgatctttcacaagtgccgtgcctacagtactcagaatcaaaagttgttaccactctaacagaaccttcaaggtaggtgttaggaaattgaataatagagccatccatgagcacataacgtgtgtcagggcgtaaactttcataagcaacagaaccttctagtacattggtatcataacaatatggtactggcttaccagaagcatctttaaaaattgtacattcagcagccaaaacacaagctgatgttgcaaagtcagtgtactctataagttttgatggtgtgtaacagatgttaccaactgcactaaaaactctaggtaagaaatgcaaaaagtcaccattagttgtgcgtaatatcgtgccaggcaaaccaggcacgacaaaacccacttctcttgttatgactgcagcaatcaatgggcaagctttgtcattagtataactaccaccacgctggctaaaccatgtgtcaaaatcagcatgtttgttagcaaaacaagtatctgtagatgctatgtcacgagtgacaccaccatcaatagccttgtatcctatgatttcacttgaaaagtcagtatgtttagacatgacatgaacaggtgttattaaatagaaaatagcagcaacaaaaaggaacacaagtgtaactttaattaactgcttcaaccaattattaacaattttaccacccttaagtgctatctttgttgttacaacattaacaacttgtctagtagttgcacatgtcaacttaaaaggtaagttattctttttagcagcactacgtatttgttttcgtagttgttcagacaatgacatgaaatctttaacgttccatatcaaagcaatgttgtgactttttgctacctgcgcattaatatgacgcgcactacagtcaatacaagcaccaaggtcacggggtgtcatgttttcaactttgttataggtgagcatatagttattacaactatcgccagtaacttctatgtcagattgatgtgacaatttaagacattcaacaacatctttagtttctacatctgaatcaacaaacccttgccgagctgctgaaataaaagtagataagacattgtctaaggacacattctttgcaagttcagcttctgcagttgcaactagtgttttgagtttttccattggtacgttaaaagttgatgaaaacgtattaacgtaagcatcaaacattttaactgcaacttccgcactatcaccaacatcagacactaatgcctgatctagtaacagtataggttgacacataagctgactgtagtaaacagacgctgattttgcagatgattcttcacattttgatttaccatcaaaaactataacattaataggcaatgaacctttagtgttattagctctcaggttgtctaagttaacaaaatgagagagagaatgtctttcataagtcttttgaccagctttatcaaagtaaagatggatggaaccattcttcactgtaacactatcaacgatgtaagaagactggtcagtaggatttattggtcttttaaactgtagtgacaagtctctcgcaacttcatcactaataaatgtactaccagcacagaatgtatcacaattaacacaattccaattgtgtagtttgcaaaagcctttacctccattagcatagacataaaaggaccttctaacaccattaacaatagttgtacattcgactcttgttgctctattacgtttgtaacacatcatacaagttgatgaattacaaccgtctacaacatgcacataacttttccatacataataaaatgatgcaaagaagatgtacattctaaccatagctgaaatcggggccatttgtacaagattaattattaaccacataagccaagaattactaataaaatgtactgcaaaatagctgaaaaacaattgcatgattgcagccaatccaagtacatagaaaaacctagtgaaaagaatatatgccaaaaaccactctgcaactaagccaaaagcagttaaatcccatttaaaagatgaaatggtaatttgtatagtttctaaagaaggataggtgtctaaagaatctaaaccactaagacaaacactacaaggtatagaaccagtacagtaggttgcaatagtgacattagtagagttcaaatagccttctctgtaaccagtacagtaagaaggcatgcctaaattagacattaaaacacctaaagcagcggttgagtagattaaagaacctaggcaaacacttaatagtaaaaaccaaattataatatttatcagtttagaaaaattaggtgacttcaaataattaaatgaagcctctagacaaaatttaccgacactcttaacagtattctttgctatagtagtcggcatagatgctttaattctagaatttgtacttctagtaaaagtacacaattgtagcaataaagtaaagaaataaggcatataattagtacaaacacggtttaaacaccgtgtaactatgttagtagttgtactaacaactttgttaagaaaaggcttagcataattagctatagtatcccaagggacactattaacagcagctaaaccatgagtagcaagggttttcaaacctaatactctagataattcattaggtttcttaatagtaagactagaattgtctacataagcagccattagatctgtgtggccaacctcttctgtaatttttaaactattatttgctggtttaagtataatgtctcctacaacttcggtagttttcacattacactcaagaacgtctttctgtatggtaggattttccactacttcttcagagactggttttagatcttcgcaggcaagattatccattccctgcgcgtcctctgacttcagtacatcaaacgaatttgatgtttcaactggttttgtgctccaaagacaacgtatacaccaggtatttggtttatacgtggctttattagttgcattgttaacatgccaaacaataggtttatgtaacaatttagctcctttcttaaaagagggtgtgtagtgtttataatcaatagccaccacatcaccatttaagtcagggaaaaatgtaactttaagctctcttgaagcaggtttcttataaccagttaactggtttaaatcatcagcaaatttgatattatcacatacaaacttaaaattatcgaagcttgcgtttggatatggttggtttggtacaagatcaattggttgctctgtgaaataagaattgtctttcttataataattgtccaacttagggtcaatttctgtacaaacaacaccatccaatttataagtaactggttttatggttgttgtgtaactgttttctttgtagaaaacatccgtaataggacctttgtattctgaggactttgtaagtaaagcaccgtctatgcaatacaaagtttctttagaagttatatgtttatagtgaccacactggtaattaccagtgtactcactagcacaagtaaatgtaccatgcttaagttcatactgagcaggtggtgctgacatcataacaaaaggtgactcctgttgtactagatattttgtagcttgtttaccacacgtacaaggtatctgaacacctttcttaaattgttcataagaaagtgtgcccatgtacataacagcttctacacccttaagggttgtctgctgttgtccacaagttttacacaccacgttcaagactcttttgcaagaatctaaattggcatgttgaaacaagtaactcattgtttctctaacatcacctaactcacctactgtcttattacagtaggctaagataagtgcacaaaagttagcagcttcaccagcccttgctctgtaataagcatcttgtagagcaggtggattaaacttcaactctatttgttggagtgttaacaatgcagtggcaagataacagttgttatctgcccatttaatagaagttaaaccattaacttgtgggtatttccactttttagtgtgatttaatgctgacatgtacctacccagaaaactaggatcagttgtgtggtagtactcaaaagcctcaacacgtagagtgtcatcattaggtaaaacataaaatgttttaccttcatgtgaattatgaggttttattttagtaacatcagctccatccaaataagttggaccaaactgttgtccatatgtcattgacatgtccacaacttgcgtgtggaggttaatgttgtctactgttgtaaacaccttaatagtcctcacttctctcaaagaaagaagtgtcttaagattgtcaaaggtgataacttcaccatctaggtggaatgtggtaggattactagtgtaatatacacttttatcacctctcttaagaaattctatacctagttgtgtagattgtccagaataggaccaatctttataggaaccagcaagtgagatggtttcaataaaatgttcttcaggtgttttagaagaagaagtaagataaccattatacgctgtaacagcatcaggtgaagaaacagaaactgtagctggcactttgagagatctcatataccgagcagcttcttccaaatttaagccatgtgttacatagccaagtggcattgtaacaagagtttcatttagatcgttaagtgtgttgataagtgacgctacagttgttttactggtgtaaaagtaaaatctagcaccataatcaaccacaccctcttgtattttaatacccttatatttacgctgtatagttgaaactatggctttagtttccacacagacaggcattaatttgcgtgtttcttctgcatgtgcaagcatttctcgcaaattccaagaaacagttccaagaatttcttgcttctcattagagataatagatggtagaatgtaaaaggcacttttacactttttaagcactgtctttgcctcctctacagtgtaaccatttaaaccctgacccgggtaagtggttatataattgtctgttggcacttttctcaaagctttcgctagcatttcagtagtgccaccagcctttttagtaggtataaccacagcagttaaaacaccctcttgaacaacatcacccactatatatggagcatctttctttaagaaagtgatgtcaatgtcactaacaagagtggcagaatctggatgaagattgccattaatgtcaatataaagtaacaagttttctgtgaggaacttagtttcttccagagttgttgtaacttcttcaacacaagctttgattttcttatcatcttgttttctctgttcaactgaaggtttactttcagttataaatggcttaacttcctctttaggaatctcagcgatcttttgttcaacttgcttttcactcttcatttccaaaaagcttgaaacaagtttgtcatagagatttttatcaaagacagctaagtagacatttgtgcgaacagtatctacacaaactcttaaagaatgtatagggtcagcaccaaaaataccagctgataataatggtgcaagtagaacttcgtgctgattaaaattttcataagcactcttaagaagttgaatgtcttcacctttgttaacatttgggccgacaacatgaagacagtgtttagcaagattgtgtccgcttaaaacacaactaccacccactttaagtggtccattagtagctatgtaatcatcagattcaacttgcatggcattgttagtagccttatttaaggctcctgcaacacctcctccatgtttaaggtaaacattggctgcattaacaaccactgttggttttacctttttagcttcttccacaatgtctgcatttttaatgtatacattgtcagtaagttttaaataaccactaaaactattcacttcaatagtctgaacaactggtgtaagttccatctctaattgaggttgaacctcaacaattgtttgaatagtagttgtctgattgtcctcactgccgtcttgttgaccaacagtttgttgactatcatcatctaaccaatcttcttcttgctcttcttcaggttgaagagcagcagaagtggcaccaaattccaaaggtttaccttggtaatcatcttcagtaccatactcatattgagttgatggctcaaactcttcttcttcacaatcaccttcttcttcatcctcatctggagggtagaaagaacaatacatatgtgaagccaatttaaactcaccagactcatcaaataagtagtatgtagccatactccactcatctaaatcaatgcccagtggtgtaagtaattcagatactggttgcaaagtttttatgacagcatctgccacaacacaggcgaactcatttacttctgtaccgagttcaactgtataggcagagcacttctcattaagtactttatcaatcctttcatcaagttcaaaagtgatattcacactcttgtaaccttgcacttctatcacagtgtcatcaccaaaagtaacctttgttggtgcaccgcctttgagtgtgaaggtattgtttgttaccatcatattaggtgcaagggcacagtacttttctgtgtctttgatttcgagcaacataagcccgttaatacaaactggtgtaccaaccaatggagcttcaacagcttcactagtaggttgttctaatggttgtaaatcaccagttttcaagacaacttcctctgttaacacttctgtgggaagtgtttctccctctaagaagataatttcttttggggcttttagaggcatgagtaggccagtttcttctctggatttaacacactttctgtacaatccctttgagtgcgtgacaaatgtttcacctaaattcaaggctttaagtttagctccaccaataatgatagagtcagcacacaaagccaaaaatttatttacaagcttaaagaatgtctgaacactctccttaatttcctttgcacaggtgacaatttgtccaccgacaatttcacaagcacaggttgagataaatttaacaatttcccaaccgtctctaagaaactctacaccttccttaaacttctcttcaagccaatcaaggacgggtttgagtttttcataaacagtgccaaagatgttagttagccactgcgaagtcaactgaacaacaccacctgtaatgtaggccattacaactagattgttagtagccaaatcagatgtgaacatcatagcatcaatgagtctcagtgaatactgtgaaattccatctagtattgttatagcggccttctgtaaaacacgcacagaattttgagcagtttcaagagtgcgggagaaaattgatcgtacaacacgagcagcctctgatgcaaatgcataaagaggactcagtattgatttctgttcaccaatattccaggcaccttttttagcttttccttttgtaactttaaaattaccacaggattcaacaatttgtttgaatgctttataatccaaacctttcacagtttccacaaaagcacttgtggaagcagaaaaagatgccaaaataatggcgatctcttcattaagtttaaagtcaccaacaatattgatgttgactttctctttttggagtatttcaagaaggttgtcattaagaccttcggaaccttctccaacaacacctgtatggttacaacctatgttagcgctagcacgtggaacccaataggcacacttgttatggcaaccaacataagagaacacacagcctccaaaggcaatagtgcgaccacccttacgaagaatggttttcaagccagattcattatggtattcggcaagactatgctcaggtcctacttctgaattgtgacatgctggacaataaattttaacaacagcattttggggtaagtaaccacaagtagtggcaccttctttagtcaaattctcagtgccacaaaattcgcaagtggctttaacaaaatcgcccgtctgccatgaagtttcaccacaatgatcacacttcatgagagttgaaaggcacatttggttgcattcatttggtgacgcaactggatagacagatcgaattctacccataaagccatcaagctttttcttttcaacccttggttgaatagtcttgattatggaatttaagggaaatacaaaatttggacattccccattgaaggtgtcaaatttctttgccaatttaatttcaaaaggtgtctgcaattcatagctcttttcagaacgttccgtgtaccaagcaatttcatgctcatgttcacggcagcagtatacacccctcttagtgtcaataaagtccagttgttcggacaaagtgcatgaagctttaccagcacgtgctagaaggtctttaatgcactcaagagggtagccatcagggccacagaagttgttatcgacatagcgagtgtatgcccctccgttaagctcacgcatgagttcacgggtaacaccactgctatgtttagtgttccagttttcttgaaaatcttcataaggatcagtgccaagctcgtcgcctaagtcaaatgactttagatcggcgccgtaactatggccaccagctcctttattaccgttcttacgaagaagaaccttgcggtaagccactggtatttcgcccacatgagggacaaggacaccaagtgtctcaccactacgaccgtactgaatgccttcgagttctgctaccagctcaaccataacatgaccatgaggtgcagttcgagcatccgaacgtttgatgaacacatagggctgttcaagttgaggcaaaacgcctttttcaacttctactaagccacaagtgccatctttaagatgttgacgtgcctctgataagacctcctccacggagtctccaaagccacgtacgagcacgtcgcgaacctgtaaaacaggcaaactgagttggacgtgtgttttctcgttgaaaccagggacaaggctctccatcttacctttcggtcacacccggacgaaacctagatgtgctgatgatcggctgcaacacggacgaaaccgtaagcagcctgcagaagatagacgagttactcgtgtcctgtcaacgacagtaattagttattaattatactgcgtgagtgcactaagcatgcagccgagtgacagccacacagattttaaagttcgtttagagaacagatctacaagagatcgaaagttggttggtttgttacctgggaaggtataaacctttaat

SEQ ID NO: 9 - RNA, 29903 nt, Severe acute respiratory syndrome coronavirus 2
auuaaagguuuauaccuucccagguaacaaaccaaccaacuuucgaucucuuguagaucuguucucuaaacgaacuuuaaaaucuguguggcugucacucggcugcaugcuuagugcacucacgcaguauaauuaauaacuaauuacugucguugacaggacacgaguaacucgucuaucuucugcaggcugcuuacgguuucguccguguugcagccgaucaucagcacaucuagguuucguccgggugugaccgaaagguaagauggagagccuugucccugguuucaacgagaaaacacacguccaacucaguuugccuguuuuacagguucgcgacgugcucguacguggcuuuggagacuccguggaggaggucuuaucagaggcacgucaacaucuuaaagauggcacuuguggcuuaguagaaguugaaaaaggcguuuugccucaacuugaacagcccuauguguucaucaaacguucggaugcucgaacugcaccucauggucauguuaugguugagcugguagcagaacucgaaggcauucaguacggucguaguggugagacacuugguguccuugucccucaugugggcgaaauaccaguggcuuaccgcaagguucuucuucguaagaacgguaauaaaggagcugguggccauaguuacggcgccgaucuaaagucauuugacuuaggcgacgagcuuggcacugauccuuaugaagauuuucaagaaaacuggaacacuaaacauagcagugguguuacccgugaacucaugcgugagcuuaacggaggggcauacacucgcuaugucgauaacaacuucuguggcccugauggcuacccucuugagugcauuaaagaccuucuagcacgugcugguaaagcuucaugcacuuuguccgaacaacuggacuuuauugacacuaagagggguguauacugcugccgugaacaugagcaugaaauugcuugguacacggaacguucugaaaagagcuaugaauugcagacaccuuuugaaauuaaauuggcaaagaaauuugacaccuucaauggggaauguccaaauuuuguauuucccuuaaauuccauaaucaagacuauucaaccaaggguugaaaagaaaaagcuugauggcuuuauggguagaauucgaucugucuauccaguugcgucaccaaaugaaugcaaccaaaugugccuuucaacucucaugaagugugaucauuguggugaaacuucauggcagacgggcgauuuuguuaaagccacuugcgaauuuuguggcacugagaauuugacuaaagaaggugccacuacuugugguuacuuaccccaaaaugcuguuguuaaaauuuauuguccagcaugucacaauucagaaguaggaccugagcauagucuugccgaauaccauaaugaaucuggcuugaaaaccauucuucguaaggguggucgcacuauugccuuuggaggcuguguguucucuuauguugguugccauaacaagugugccuauuggguuccacgugcuagcgcuaacauagguuguaaccauacagguguuguuggagaagguuccgaaggucuuaaugacaaccuucuugaaauacuccaaaaagagaaagucaacaucaauauuguuggugacuuuaaacuuaaugaagagaucgccauuauuuuggcaucuuuuucugcuuccacaagugcuuuuguggaaacugugaaagguuuggauuauaaagcauucaaacaaauuguugaauccugugguaauuuuaaaguuacaaaaggaaaagcuaaaaaaggugccuggaauauuggugaacagaaaucaauacugaguccucuuuaugcauuugcaucagaggcugcucguguuguacgaucaauuuucucccgcacucuugaaacugcucaaaauucugugcguguuuuacagaaggccgcuauaacaauacuagauggaauuucacaguauucacugagacucauugaugcuaugauguucacaucugauuuggcuacuaacaaucuaguuguaauggccuacauuacaggugguguuguucaguugacuucgcaguggcuaacuaacaucuuuggcacuguuuaugaaaaacucaaacccguccuugauuggcuugaagagaaguuuaaggaagguguagaguuucuuagagacgguugggaaauuguuaaauuuaucucaaccugugcuugugaaauugucgguggacaaauugucaccugugcaaaggaaauuaaggagaguguucagacauucuuuaagcuuguaaauaaauuuuuggcuuugugugcugacucuaucauuauugguggagcuaaacuuaaagccuugaauuuaggugaaacauuugucacgcacucaaagggauuguacagaaaguguguuaaauccagagaagaaacuggccuacucaugccucuaaaagccccaaaagaaauuaucuucuuagagggagaaacacuucccacagaaguguuaacagaggaaguugucuugaaaacuggugauuuacaaccauuagaacaaccuacuagugaagcuguugaagcuccauugguugguacaccaguuuguauuaacgggcuuauguugcucgaaaucaaagacacagaaaaguacugugcccuugcaccuaauaugaugguaacaaacaauaccuucacacucaaaggcggugcaccaacaaagguuacuuuuggugaugacacugugauagaagugcaagguuacaagagugugaauaucacuuuugaacuugaugaaaggauugauaaaguacuuaaugagaagugcucugccuauacaguugaacucgguacagaaguaaaugaguucgccuguguuguggcagaugcugucauaaaaacuuugcaaccaguaucugaauuacuuacaccacugggcauugauuuagaugaguggaguauggcuacauacuacuuauuugaugagucuggugaguuuaaauuggcuucacauauguauuguucuuucuacccuccagaugaggaugaagaagaaggugauugugaagaagaagaguuugagccaucaacucaauaugaguaugguacugaagaugauuaccaagguaaaccuuuggaauuuggugccacuucugcugcucuucaaccugaagaagagcaagaagaagauugguuagaugaugauagucaacaaacuguuggucaacaagacggcagugaggacaaucagacaacuacuauucaaacaauuguugagguucaaccucaauuagagauggaacuuacaccaguuguucagacuauugaagugaauaguuuuagugguuauuuaaaacuuacugacaauguauacauuaaaaaugcagacauuguggaagaagcuaaaaagguaaaaccaacagugguuguuaaugcagccaauguuuaccuuaaacauggaggagguguugcaggagccuuaaauaaggcuacuaacaaugccaugcaaguugaaucugaugauuacauagcuacuaauggaccacuuaaagugggugguaguuguguuuuaagcggacacaaucuugcuaaacacugucuucauguugucggcccaaauguuaacaaaggugaagacauucaacuucuuaagagugcuuaugaaaauuuuaaucagcacgaaguucuacuugcaccauuauuaucagcugguauuuuuggugcugacccuauacauucuuuaagaguuuguguagauacuguucgcacaaaugucuacuuagcugucuuugauaaaaaucucuaugacaaacuuguuucaagcuuuuuggaaaugaagagugaaaagcaaguugaacaaaagaucgcugagauuccuaaagaggaaguuaagccauuuauaacugaaaguaaaccuucaguugaacagagaaaacaagaugauaagaaaaucaaagcuuguguugaagaaguuacaacaacucuggaagaaacuaaguuccucacagaaaacuuguuacuuuauauugacauuaauggcaaucuucauccagauucugccacucuuguuagugacauugacaucacuuucuuaaagaaagaugcuccauauauagugggugauguuguucaagaggguguuuuaacugcugugguuauaccuacuaaaaaggcugguggcacuacugaaaugcuagcgaaagcuuugagaaaagugccaacagacaauuauauaaccacuuacccgggucaggguuuaaaugguuacacuguagaggaggcaaagacagugcuuaaaaaguguaaaagugccuuuuacauucuaccaucuauuaucucuaaugagaagcaagaaauucuuggaacuguuucuuggaauuugcgagaaaugcuugcacaugcagaagaaacacgcaaauuaaugccugucuguguggaaacuaaagccauaguuucaacuauacagcguaaauauaaggguauuaaaauacaagagggugugguugauuauggugcuagauuuuacuuuuacaccaguaaaacaacuguagcgucacuuaucaacacacuuaacgaucuaaaugaaacucuuguuacaaugccacuuggcuauguaacacauggcuuaaauuuggaagaagcugcucgguauaugagaucucucaaagugccagcuacaguuucuguuucuucaccugaugcuguuacagcguauaaugguuaucuuacuucuucuucuaaaacaccugaagaacauuuuauugaaaccaucucacuugcugguuccuauaaagauugguccuauucuggacaaucuacacaacuagguauagaauuucuuaagagaggugauaaaaguguauauuacacuaguaauccuaccacauuccaccuagauggugaaguuaucaccuuugacaaucuuaagacacuucuuucuuugagagaagugaggacuauuaagguguuuacaacaguagacaacauuaaccuccacacgcaaguuguggacaugucaaugacauauggacaacaguuugguccaacuuauuuggauggagcugauguuacuaaaauaaaaccucauaauucacaugaagguaaaacauuuuauguuuuaccuaaugaugacacucuacguguugaggcuuuugaguacuaccacacaacugauccuaguuuucuggguagguacaugucagcauuaaaucacacuaaaaaguggaaauacccacaaguuaaugguuuaacuucuauuaaaugggcagauaacaacuguuaucuugccacugcauuguuaacacuccaacaaauagaguugaaguuuaauccaccugcucuacaagaugcuuauuacagagcaagggcuggugaagcugcuaacuuuugugcacuuaucuuagccuacuguaauaagacaguaggugaguuaggugauguuagagaaacaaugaguuacuuguuucaacaugccaauuuagauucuugcaaaagagucuugaacgugguguguaaaacuuguggacaacagcagacaacccuuaaggguguagaagcuguuauguacaugggcacacuuucuuaugaacaauuuaagaaagguguucagauaccuuguacgugugguaaacaagcuacaaaauaucuaguacaacaggagucaccuuuuguuaugaugucagcaccaccugcucaguaugaacuuaagcaugguacauuuacuugugcuagugaguacacugguaauuaccaguguggucacuauaaacauauaacuucuaaagaaacuuuguauugcauagacggugcuuuacuuacaaaguccucagaauacaaagguccuauuacggauguuuucuacaaagaaaacaguuacacaacaaccauaaaaccaguuacuuauaaauuggaugguguuguuuguacagaaauugacccuaaguuggacaauuauuauaagaaagacaauucuuauuucacagagcaaccaauugaucuuguaccaaaccaaccauauccaaacgcaagcuucgauaauuuuaaguuuguaugugauaauaucaaauuugcugaugauuuaaaccaguuaacugguuauaagaaaccugcuucaagagagcuuaaaguuacauuuuucccugacuuaaauggugaugugguggcuauugauuauaaacacuacacacccucuuuuaagaaaggagcuaaauuguuacauaaaccuauuguuuggcauguuaacaaugcaacuaauaaagccacguauaaaccaaauaccugguguauacguugucuuuggagcacaaaaccaguugaaacaucaaauucguuugauguacugaagucagaggacgcgcagggaauggauaaucuugccugcgaagaucuaaaaccagucucugaagaaguaguggaaaauccuaccauacagaaagacguucuugaguguaaugugaaaacuaccgaaguuguaggagacauuauacuuaaaccagcaaauaauaguuuaaaaauuacagaagagguuggccacacagaucuaauggcugcuuauguagacaauucuagucuuacuauuaagaaaccuaaugaauuaucuagaguauuagguuugaaaacccuugcuacucaugguuuagcugcuguuaauagugucccuugggauacuauagcuaauuaugcuaagccuuuucuuaacaaaguuguuaguacaacuacuaacauaguuacacgguguuuaaaccguguuuguacuaauuauaugccuuauuucuuuacuuuauugcuacaauuguguacuuuuacuagaaguacaaauucuagaauuaaagcaucuaugccgacuacuauagcaaagaauacuguuaagagugucgguaaauuuugucuagaggcuucauuuaauuauuugaagucaccuaauuuuucuaaacugauaaauauuauaauuugguuuuuacuauuaaguguuugccuagguucuuuaaucuacucaaccgcugcuuuagguguuuuaaugucuaauuuaggcaugccuucuuacuguacugguuacagagaaggcuauuugaacucuacuaaugucacuauugcaaccuacuguacugguucuauaccuuguaguguuugucuuagugguuuagauucuuuagacaccuauccuucuuuagaaacuauacaaauuaccauuucaucuuuuaaaugggauuuaacugcuuuuggcuuaguugcagagugguuuuuggcauauauucuuuucacuagguuuuucuauguacuuggauuggcugcaaucaugcaauuguuuuucagcuauuuugcaguacauuuuauuaguaauucuuggcuuaugugguuaauaauuaaucuuguacaaauggccccgauuucagcuaugguuagaauguacaucuucuuugcaucauuuuauuauguauggaaaaguuaugugcauguuguagacgguuguaauucaucaacuuguaugauguguuacaaacguaauagagcaacaagagucgaauguacaacuauuguuaaugguguuagaagguccuuuuaugucuaugcuaauggagguaaaggcuuuugcaaacuacacaauuggaauuguguuaauugugauacauucugugcugguaguacauuuauuagugaugaaguugcgagagacuugucacuacaguuuaaaagaccaauaaauccuacugaccagucuucuuacaucguugauaguguuacagugaagaaugguuccauccaucuuuacuuugauaaagcuggucaaaagacuuaugaaagacauucucucucucauuuuguuaacuuagacaaccugagagcuaauaacacuaaagguucauugccuauuaauguuauaguuuuugaugguaaaucaaaaugugaagaaucaucugcaaaaucagcgucuguuuacuacagucagcuuaugugucaaccuauacuguuacuagaucaggcauuagugucugauguuggugauagugcggaaguugcaguuaaaauguuugaugcuuacguuaauacguuuucaucaacuuuuaacguaccaauggaaaaacucaaaacacuaguugcaacugcagaagcugaacuugcaaagaauguguccuuagacaaugucuuaucuacuuuuauuucagcagcucggcaaggguuuguugauucagauguagaaacuaaagauguuguugaaugucuuaaauugucacaucaaucugacauagaaguuacuggcgauaguuguaauaacuauaugcucaccuauaacaaaguugaaaacaugacaccccgugaccuuggugcuuguauugacuguagugcgcgucauauuaaugcgcagguagcaaaaagucacaacauugcuuugauauggaacguuaaagauuucaugucauugucugaacaacuacgaaaacaaauacguagugcugcuaaaaagaauaacuuaccuuuuaaguugacaugugcaacuacuagacaaguuguuaauguuguaacaacaaagauagcacuuaagggugguaaaauuguuaauaauugguugaagcaguuaauuaaaguuacacuuguguuccuuuuuguugcugcuauuuucuauuuaauaacaccuguucaugucaugucuaaacauacugacuuuucaagugaaaucauaggauacaaggcuauugaugguggugucacucgugacauagcaucuacagauacuuguuuugcuaacaaacaugcugauuuugacacaugguuuagccagcguggugguaguuauacuaaugacaaagcuugcccauugauugcugcagucauaacaagagaaguggguuuugucgugccugguuugccuggcacgauauuacgcacaacuaauggugacuuuuugcauuucuuaccuagaguuuuuagugcaguugguaacaucuguuacacaccaucaaaacuuauagaguacacugacuuugcaacaucagcuuguguuuuggcugcugaauguacaauuuuuaaagaugcuucugguaagccaguaccauauuguuaugauaccaauguacuagaagguucuguugcuuaugaaaguuuacgcccugacacacguuaugugcucauggauggcucuauuauucaauuuccuaacaccuaccuugaagguucuguuagagugguaacaacuuuugauucugaguacuguaggcacggcacuugugaaagaucagaagcugguguuuguguaucuacuagugguagauggguacuuaacaaugauuauuacagaucuuuaccaggaguuuucugugguguagaugcuguaaauuuacuuacuaauauguuuacaccacuaauucaaccuauuggugcuuuggacauaucagcaucuauaguagcuggugguauuguagcuaucguaguaacaugccuugccuacuauuuuaugagguuuagaagagcuuuuggugaauacagucauguaguugccuuuaauacuuuacuauuccuuaugucauucacuguacucuguuuaacaccaguuuacucauucuuaccugguguuuauucuguuauuuacuuguacuugacauuuuaucuuacuaaugauguuucuuuuuuagcacauauucaguggaugguuauguucacaccuuuaguaccuuucuggauaacaauugcuuauaucauuuguauuuccacaaagcauuucuauugguucuuuaguaauuaccuaaagagacguguagucuuuaaugguguuuccuuuaguacuuuugaagaagcugcgcugugcaccuuuuuguuaaauaaagaaauguaucuaaaguugcguagugaugugcuauuaccucuuacgcaauauaauagauacuuagcucuuuauaauaaguacaaguauuuuaguggagcaauggauacaacuagcuacagagaagcugcuuguugucaucucgcaaaggcucucaaugacuucaguaacucagguucugauguucuuuaccaaccaccacaaaccucuaucaccucagcuguuuugcagagugguuuuagaaaaauggcauucccaucugguaaaguugaggguuguaugguacaaguaacuugugguacaacuacacuuaacggucuuuggcuugaugacguaguuuacuguccaagacaugugaucugcaccucugaagacaugcuuaacccuaauuaugaagauuuacucauucguaagucuaaucauaauuucuugguacaggcugguaauguucaacucaggguuauuggacauucuaugcaaaauuguguacuuaagcuuaagguugauacagccaauccuaagacaccuaaguauaaguuuguucgcauucaaccaggacagacuuuuucaguguuagcuuguuacaaugguucaccaucugguguuuaccaaugugcuaugaggcccaauuucacuauuaaggguucauuccuuaaugguucaugugguaguguugguuuuaacauagauuaugacugugucucuuuuuguuacaugcaccauauggaauuaccaacuggaguucaugcuggcacagacuuagaagguaacuuuuauggaccuuuuguugacaggcaaacagcacaagcagcugguacggacacaacuauuacaguuaauguuuuagcuugguuguacgcugcuguuauaaauggagacaggugguuucucaaucgauuuaccacaacucuuaaugacuuuaaccuuguggcuaugaaguacaauuaugaaccucuaacacaagaccauguugacauacuaggaccucuuucugcucaaacuggaauugccguuuuagauaugugugcuucauuaaaagaauuacugcaaaaugguaugaauggacguaccauauuggguagugcuuuauuagaagaugaauuuacaccuuuugauguuguuagacaaugcucagguguuacuuuccaaagugcagugaaaagaacaaucaaggguacacaccacugguuguuacucacaauuuugacuucacuuuuaguuuuaguccagaguacucaauggucuuuguucuuuuuuuuguaugaaaaugccuuuuuaccuuuugcuauggguauuauugcuaugucugcuuuugcaaugauguuugucaaacauaagcaugcauuucucuguuuguuuuuguuaccuucucuugccacuguagcuuauuuuaauauggucuauaugccugcuaguugggugaugcguauuaugacaugguuggauaugguugauacuaguuugucugguuuuaagcuaaaagacuguguuauguaugcaucagcuguaguguuacuaauccuuaugacagcaagaacuguguaugaugauggugcuaggagaguguggacacuuaugaaugucuugacacucguuuauaaaguuuauuaugguaaugcuuuagaucaagccauuuccaugugggcucuuauaaucucuguuacuucuaacuacucagguguaguuacaacugucauguuuuuggccagagguauuguuuuuauguguguugaguauugcccuauuuucuucauaacugguaauacacuucaguguauaaugcuaguuuauuguuucuuaggcuauuuuuguacuuguuacuuuggccucuuuuguuuacucaaccgcuacuuuagacugacucuugguguuuaugauuacuuaguuucuacacaggaguuuagauauaugaauucacagggacuacucccacccaagaauagcauagaugccuucaaacucaacauuaaauuguuggguguugguggcaaaccuuguaucaaaguagccacuguacagucuaaaaugucagauguaaagugcacaucaguagucuuacucucaguuuugcaacaacucagaguagaaucaucaucuaaauugugggcucaauguguccaguuacacaaugacauucucuuagcuaaagauacuacugaagccuuugaaaaaaugguuucacuacuuucuguuuugcuuuccaugcagggugcuguagacauaaacaagcuuugugaagaaaugcuggacaacagggcaaccuuacaagcuauagccucagaguuuaguucccuuccaucauaugcagcuuuugcuacugcucaagaagcuuaugagcaggcuguugcuaauggugauucugaaguuguucuuaaaaaguugaagaagucuuugaauguggcuaaaucugaauuugaccgugaugcagccaugcaacguaaguuggaaaagauggcugaucaagcuaugacccaaauguauaaacaggcuagaucugaggacaagagggcaaaaguuacuagugcuaugcagacaaugcuuuucacuaugcuuagaaaguuggauaaugaugcacucaacaacauuaucaacaaugcaagagaugguuguguucccuugaacauaauaccucuuacaacagcagccaaacuaaugguugucauaccagacuauaacacauauaaaaauacgugugaugguacaacauuuacuuaugcaucagcauugugggaaauccaacagguuguagaugcagauaguaaaauuguucaacuuagugaaauuaguauggacaauucaccuaauuuagcauggccucuuauuguaacagcuuuaagggccaauucugcugucaaauuacagaauaaugagcuuaguccuguugcacuacgacagaugucuugugcugccgguacuacacaaacugcuugcacugaugacaaugcguuagcuuacuacaacacaacaaagggagguagguuuguacuugcacuguuauccgauuuacaggauuugaaaugggcuagauucccuaagagugauggaacugguacuaucuauacagaacuggaaccaccuuguagguuuguuacagacacaccuaaagguccuaaagugaaguauuuauacuuuauuaaaggauuaaacaaccuaaauagagguaugguacuugguaguuuagcugccacaguacgucuacaagcugguaaugcaacagaagugccugccaauucaacuguauuaucuuucugugcuuuugcuguagaugcugcuaaagcuuacaaagauuaucuagcuagugggggacaaccaaucacuaauuguguuaagauguuguguacacacacugguacuggucaggcaauaacaguuacaccggaagccaauauggaucaagaauccuuugguggugcaucguguugucuguacugccguugccacauagaucauccaaauccuaaaggauuuugugacuuaaaagguaaguauguacaaauaccuacaacuugugcuaaugacccuguggguuuuacacuuaaaaacacagucuguaccgucugcgguauguggaaagguuauggcuguaguugugaucaacuccgcgaacccaugcuucagucagcugaugcacaaucguuuuuaaacggguuugcgguguaagugcagcccgucuuacaccgugcggcacaggcacuaguacugaugucguauacagggcuuuugacaucuacaaugauaaaguagcugguuuugcuaaauuccuaaaaacuaauuguugucgcuuccaagaaaaggacgaagaugacaauuuaauugauucuuacuuuguaguuaagagacacacuuucucuaacuaccaacaugaagaaacaauuuauaauuuacuuaaggauuguccagcuguugcuaaacaugacuucuuuaaguuuagaauagacggugacaugguaccacauauaucacgucaacgucuuacuaaauacacaauggcagaccucgucuaugcuuuaaggcauuuugaugaagguaauugugacacauuaaaagaaauacuugucacauacaauuguugugaugaugauuauuucaauaaaaaggacugguaugauuuuguagaaaacccagauauauuacgcguauacgccaacuuaggugaacguguacgccaagcuuuguuaaaaacaguacaauucugugaugccaugcgaaaugcugguauuguugguguacugacauuagauaaucaagaucucaaugguaacugguaugauuucggugauuucauacaaaccacgccagguaguggaguuccuguuguagauucuuauuauucauuguuaaugccuauauuaaccuugaccagggcuuuaacugcagagucacauguugacacugacuuaacaaagccuuacauuaagugggauuuguuaaaauaugacuucacggaagagagguuaaaacucuuugaccguuauuuuaaauauugggaucagacauaccacccaaauuguguuaacuguuuggaugacagaugcauucugcauugugcaaacuuuaauguuuuauucucuacaguguucccaccuacaaguuuuggaccacuagugagaaaaauauuuguugaugguguuccauuuguaguuucaacuggauaccacuucagagagcuagguguuguacauaaucaggauguaaacuuacauagcucuagacuuaguuuuaaggaauuacuuguguaugcugcugacccugcuaugcacgcugcuucugguaaucuauuacuagauaaacgcacuacgugcuuuucaguagcugcacuuacuaacaauguugcuuuucaaacugucaaacccgguaauuuuaacaaagacuucuaugacuuugcugugucuaaggguuucuuuaaggaaggaaguucuguugaauuaaaacacuucuucuuugcucaggaugguaaugcugcuaucagcgauuaugacuacuaucguuauaaucuaccaacaaugugugauaucagacaacuacuauuuguaguugaaguuguugauaaguacuuugauuguuacgaugguggcuguauuaaugcuaaccaagucaucgucaacaaccuagacaaaucagcugguuuuccauuuaauaaaugggguaaggcuagacuuuauuaugauucaaugaguuaugaggaucaagaugcacuuuucgcauauacaaaacguaaugucaucccuacuauaacucaaaugaaucuuaaguaugccauuagugcaaagaauagagcucgcaccguagcuggugucucuaucuguaguacuaugaccaauagacaguuucaucaaaaauuauugaaaucaauagccgccacuagaggagcuacuguaguaauuggaacaagcaaauucuauggugguuggcacaacauguuaaaaacuguuuauagugauguagaaaacccucaccuuauggguugggauuauccuaaaugugauagagccaugccuaacaugcuuagaauuauggccucacuuguucuugcucgcaaacauacaacguguuguagcuugucacaccguuucuauagauuagcuaaugagugugcucaaguauugagugaaauggucauguguggcgguucacuauauguuaaaccagguggaaccucaucaggagaugccacaacugcuuaugcuaauaguguuuuuaacauuugucaagcugucacggccaauguuaaugcacuuuuaucuacugaugguaacaaaauugccgauaaguauguccgcaauuuacaacacagacuuuaugagugucucuauagaaauagagauguugacacagacuuugugaaugaguuuuacgcauauuugcguaaacauuucucaaugaugauacucucugacgaugcuguuguguguuucaauagcacuuaugcaucucaaggucuaguggcuagcauaaagaacuuuaagucaguucuuuauuaucaaaacaauguuuuuaugucugaagcaaaauguuggacugagacugaccuuacuaaaggaccucaugaauuuugcucucaacauacaaugcuaguuaaacagggugaugauuauguguaccuuccuuacccagauccaucaagaauccuaggggccggcuguuuuguagaugauaucguaaaaacagaugguacacuuaugauugaacgguucgugucuuuagcuauagaugcuuacccacuuacuaaacauccuaaucaggaguaugcugaugucuuucauuuguacuuacaauacauaagaaagcuacaugaugaguuaacaggacacauguuagacauguauucuguuaugcuuacuaaugauaacacuucaagguauugggaaccugaguuuuaugaggcuauguacacaccgcauacagucuuacaggcuguuggggcuuguguucuuugcaauucacagacuucauuaagauguggugcuugcauacguagaccauucuuauguuguaaaugcuguuacgaccaugucauaucaacaucacauaaauuagucuugucuguuaauccguauguuugcaaugcuccagguugugaugucacagaugugacucaacuuuacuuaggagguaugagcuauuauuguaaaucacauaaaccacccauuaguuuuccauugugugcuaauggacaaguuuuugguuuauauaaaaauacauguguugguagcgauaauguuacugacuuuaaugcaauugcaacaugugacuggacaaaugcuggugauuacauuuuagcuaacaccuguacugaaagacucaagcuuuuugcagcagaaacgcucaaagcuacugaggagacauuuaaacugucuuaugguauugcuacuguacgugaagugcugucugacagagaauuacaucuuucaugggaaguugguaaaccuagaccaccacuuaaccgaaauuaugucuuuacugguuaucguguaacuaaaaacaguaaaguacaaauaggagaguacaccuuugaaaaaggugacuauggugaugcuguuguuuaccgagguacaacaacuuacaaauuaaauguuggugauuauuuugugcugacaucacauacaguaaugccauuaagugcaccuacacuagugccacaagagcacuauguuagaauuacuggcuuauacccaacacucaauaucucagaugaguuuucuagcaauguugcaaauuaucaaaagguugguaugcaaaaguauucuacacuccagggaccaccugguacugguaagagucauuuugcuauuggccuagcucucuacuacccuucugcucgcauaguguauacagcuugcucucaugccgcuguugaugcacuaugugagaaggcauuaaaauauuugccuauagauaaauguaguagaauuauaccugcacgugcucguguagaguguuuugauaaauucaaagugaauucaacauuagaacaguaugucuuuuguacuguaaaugcauugccugagacgacagcagauauaguugucuuugaugaaauuucaauggccacaaauuaugauuugaguguugucaaugccagauuacgugcuaagcacuauguguacauuggcgacccugcucaauuaccugcaccacgcacauugcuaacuaagggcacacuagaaccagaauauuucaauucaguguguagacuuaugaaaacuauagguccagacauguuccucggaacuugucggcguuguccugcugaaauuguugacacugugagugcuuugguuuaugauaauaagcuuaaagcacauaaagacaaaucagcucaaugcuuuaaaauguuuuauaaggguguuaucacgcaugauguuucaucugcaauuaacaggccacaaauaggcgugguaagagaauuccuuacacguaacccugcuuggagaaaagcugucuuuauuucaccuuauaauucacagaaugcuguagccucaaagauuuugggacuaccaacucaaacuguugauucaucacagggcucagaauaugacuaugucauauucacucaaaccacugaaacagcucacucuuguaauguaaacagauuuaauguugcuauuaccagagcaaaaguaggcauacuuugcauaaugucugauagagaccuuuaugacaaguugcaauuuacaagucuugaaauuccacguaggaauguggcaacuuuacaagcugaaaauguaacaggacucuuuaaagauuguaguaagguaaucacuggguuacauccuacacaggcaccuacacaccucaguguugacacuaaauucaaaacugaagguuuauguguugacauaccuggcauaccuaaggacaugaccuauagaagacucaucucuaugauggguuuuaaaaugaauuaucaaguuaaugguuacccuaacauguuuaucacccgcgaagaagcuauaagacauguacgugcauggauuggcuucgaugucgaggggugucaugcuacuagagaagcuguugguaccaauuuaccuuuacagcuagguuuuucuacagguguuaaccuaguugcuguaccuacagguuauguugauacaccuaauaauacagauuuuuccagaguuagugcuaaaccaccgccuggagaucaauuuaaacaccucauaccacuuauguacaaaggacuuccuuggaauguagugcguauaaagauuguacaaauguuaagugacacacuuaaaaaucucucugacagagucguauuugucuuaugggcacauggcuuugaguugacaucuaugaaguauuuugugaaaauaggaccugagcgcaccuguugucuaugugauagacgugccacaugcuuuuccacugcuucagacacuuaugccuguuggcaucauucuauuggauuugauuacgucuauaauccguuuaugauugauguucaacaaugggguuuuacagguaaccuacaaagcaaccaugaucuguauugucaaguccaugguaaugcacauguagcuaguugugaugcaaucaugacuaggugucuagcuguccacgagugcuuuguuaagcguguugacuggacuauugaauauccuauaauuggugaugaacugaagauuaaugcggcuuguagaaagguucaacacaugguuguuaaagcugcauuauuagcagacaaauucccaguucuucacgacauugguaacccuaaagcuauuaaguguguaccucaagcugauguagaauggaaguucuaugaugcacagccuuguagugacaaagcuuauaaaauagaagaauuauucuauucuuaugccacacauucugacaaauucacagaugguguaugccuauuuuggaauugcaaugucgauagauauccugcuaauuccauuguuuguagauuugacacuagagugcuaucuaaccuuaacuugccugguugugaugguggcaguuuguauguaaauaaacaugcauuccacacaccagcuuuugauaaaagugcuuuuguuaauuuaaaacaauuaccauuuuucuauuacucugacaguccaugugagucucauggaaaacaaguagugucagauauagauuauguaccacuaaagucugcuacguguauaacacguugcaauuuagguggugcugucuguagacaucaugcuaaugaguacagauuguaucucgaugcuuauaacaugaugaucucagcuggcuuuagcuuguggguuuacaaacaauuugauacuuauaaccucuggaacacuuuuacaagacuucagaguuuagaaaauguggcuuuuaauguuguaaauaagggacacuuugauggacaacagggugaaguaccaguuucuaucauuaauaacacuguuuacacaaaaguugaugguguugauguagaauuguuugaaaauaaaacaacauuaccuguuaauguagcauuugagcuuugggcuaagcgcaacauuaaaccaguaccagaggugaaaauacucaauaauuuggguguggacauugcugcuaauacugugaucugggacuacaaaagagaugcuccagcacauauaucuacuauugguguuuguucuaugacugacauagccaagaaaccaacugaaacgauuugugcaccacucacugucuuuuuugaugguagaguugauggucaaguagacuuauuuagaaaugcccguaaugguguucuuauuacagaagguaguguuaaagguuuacaaccaucuguaggucccaaacaagcuagucuuaauggagucacauuaauuggagaagccguaaaaacacaguucaauuauuauaagaaaguugaugguguuguccaacaauuaccugaaacuuacuuuacucagaguagaaauuuacaagaauuuaaacccaggagucaaauggaaauugauuucuuagaauuagcuauggaugaauucauugaacgguauaaauuagaaggcuaugccuucgaacauaucguuuauggagauuuuagucauagucaguuaggugguuuacaucuacugauuggacuagcuaaacguuuuaaggaaucaccuuuugaauuagaagauuuuauuccuauggacaguacaguuaaaaacuauuucauaacagaugcgcaaacagguucaucuaaguguguguguucuguuauugauuuauuacuugaugauuuuguugaaauaauaaaaucccaagauuuaucuguaguuucuaagguugucaaagugacuauugacuauacagaaauuucauuuaugcuuugguguaaagauggccauguagaaacauuuuacccaaaauuacaaucuagucaagcguggcaaccggguguugcuaugccuaaucuuuacaaaaugcaaagaaugcuauuagaaaagugugaccuucaaaauuauggugauagugcaacauuaccuaaaggcauaaugaugaaugucgcaaaauauacucaacugugucaauauuuaaacacauuaacauuagcuguacccuauaauaugagaguuauacauuuuggugcugguucugauaaaggaguugcaccagguacagcuguuuuaagacagugguugccuacggguacgcugcuugucgauucagaucuuaaugacuuugucucugaugcagauucaacuuugauuggugauugugcaacuguacauacagcuaauaaaugggaucucauuauuagugauauguacgacccuaagacuaaaaauguuacaaaagaaaaugacucuaaagaggguuuuuucacuuacauuuguggguuuauacaacaaaagcuagcucuuggagguuccguggcuauaaagauaacagaacauucuuggaaugcugaucuuuauaagcucaugggacacuucgcaugguggacagccuuuguuacuaaugugaaugcgucaucaucugaagcauuuuuaauuggauguaauuaucuuggcaaaccacgcgaacaaauagaugguuaugucaugcaugcaaauuacauauuuuggaggaauacaaauccaauucaguugucuuccuauucuuuauuugacaugaguaaauuuccccuuaaauuaagggguacugcuguuaugucuuuaaaagaaggucaaaucaaugauaugauuuuaucucuucuuaguaaagguagacuuauaauuagagaaaacaacagaguuguuauuucuagugauguucuuguuaacaacuaaacgaacaauguuuguuuuucuuguuuuauugccacuagucucuagucaguguguuaaucuuacaaccagaacucaauuacccccugcauacacuaauucuuucacacgugguguuuauuacccugacaaaguuuucagauccucaguuuuacauucaacucaggacuuguucuuaccuuucuuuuccaauguuacuugguuccaugcuauacaugucucugggaccaaugguacuaagagguuugauaacccuguccuaccauuuaaugaugguguuuauuuugcuuccacugagaagucuaacauaauaagaggcuggauuuuugguacuacuuuagauucgaagacccagucccuacuuauuguuaauaacgcuacuaauguuguuauuaaagucugugaauuucaauuuuguaaugauccauuuuuggguguuuauuaccacaaaaacaacaaaaguuggauggaaagugaguucagaguuuauucuagugcgaauaauugcacuuuugaauaugucucucagccuuuucuuauggaccuugaaggaaaacaggguaauuucaaaaaucuuagggaauuuguguuuaagaauauugaugguuauuuuaaaauauauucuaagcacacgccuauuaauuuagugcgugaucucccucaggguuuuucggcuuuagaaccauugguagauuugccaauagguauuaacaucacuagguuucaaacuuuacuugcuuuacauagaaguuauuugacuccuggugauucuucuucagguuggacagcuggugcugcagcuuauuauguggguuaucuucaaccuaggacuuuucuauuaaaauauaaugaaaauggaaccauuacagaugcuguagacugugcacuugacccucucucagaaacaaaguguacguugaaauccuucacuguagaaaaaggaaucuaucaaacuucuaacuuuagaguccaaccaacagaaucuauuguuagauuuccuaauauuacaaacuugugcccuuuuggugaaguuuuuaacgccaccagauuugcaucuguuuaugcuuggaacaggaagagaaucagcaacuguguugcugauuauucuguccuauauaauuccgcaucauuuuccacuuuuaaguguuauggagugucuccuacuaaauuaaaugaucucugcuuuacuaaugucuaugcagauucauuuguaauuagaggugaugaagucagacaaaucgcuccagggcaaacuggaaagauugcugauuauaauuauaaauuaccagaugauuuuacaggcugcguuauagcuuggaauucuaacaaucuugauucuaagguuggugguaauuauaauuaccuguauagauuguuuaggaagucuaaucucaaaccuuuugagagagauauuucaacugaaaucuaucaggccgguagcacaccuuguaaugguguugaagguuuuaauuguuacuuuccuuuacaaucauaugguuuccaacccacuaaugguguugguuaccaaccauacagaguaguaguacuuucuuuugaacuucuacaugcaccagcaacuguuuguggaccuaaaaagucuacuaauuugguuaaaaacaaaugugucaauuucaacuucaaugguuuaacaggcacagguguucuuacugagucuaacaaaaaguuucugccuuuccaacaauuuggcagagacauugcugacacuacugaugcuguccgugauccacagacacuugagauucuugacauuacaccauguucuuuugguggugucaguguuauaacaccaggaacaaauacuucuaaccagguugcuguucuuuaucaggauguuaacugcacagaagucccuguugcuauucaugcagaucaacuuacuccuacuuggcguguuuauucuacagguucuaauguuuuucaaacacgugcaggcuguuuaauaggggcugaacaugucaacaacucauaugagugugacauacccauuggugcagguauaugcgcuaguuaucagacucagacuaauucuccucggcgggcacguaguguagcuagucaauccaucauugccuacacuaugucacuuggugcagaaaauucaguugcuuacucuaauaacucuauugccauacccacaaauuuuacuauuaguguuaccacagaaauucuaccagugucuaugaccaagacaucaguagauuguacaauguacauuuguggugauucaacugaaugcagcaaucuuuuguugcaauauggcaguuuuuguacacaauuaaaccgugcuuuaacuggaauagcuguugaacaagacaaaaacacccaagaaguuuuugcacaagucaaacaaauuuacaaaacaccaccaauuaaagauuuuggugguuuuaauuuuucacaaauauuaccagauccaucaaaaccaagcaagaggucauuuauugaagaucuacuuuucaacaaagugacacuugcagaugcuggcuucaucaaacaauauggugauugccuuggugauauugcugcuagagaccucauuugugcacaaaaguuuaacggccuuacuguuuugccaccuuugcucacagaugaaaugauugcucaauacacuucugcacuguuagcggguacaaucacuucugguuggaccuuuggugcaggugcugcauuacaaauaccauuugcuaugcaaauggcuuauagguuuaaugguauuggaguuacacagaauguucucuaugagaaccaaaaauugauugccaaccaauuuaauagugcuauuggcaaaauucaagacucacuuucuuccacagcaagugcacuuggaaaacuucaagauguggucaaccaaaaugcacaagcuuuaaacacgcuuguuaaacaacuuagcuccaauuuuggugcaauuucaaguguuuuaaaugauauccuuucacgucuugacaaaguugaggcugaagugcaaauugauagguugaucacaggcagacuucaaaguuugcagacauaugugacucaacaauuaauuagagcugcagaaaucagagcuucugcuaaucuugcugcuacuaaaaugucagaguguguacuuggacaaucaaaaagaguugauuuuuguggaaagggcuaucaucuuauguccuucccucagucagcaccucaugguguagucuucuugcaugugacuuaugucccugcacaagaaaagaacuucacaacugcuccugccauuugucaugauggaaaagcacacuuuccucgugaaggugucuuuguuucaaauggcacacacugguuuguaacacaaaggaauuuuuaugaaccacaaaucauuacuacagacaacacauuugugucugguaacugugauguuguaauaggaauugucaacaacacaguuuaugauccuuugcaaccugaauuagacucauucaaggaggaguuagauaaauauuuuaagaaucauacaucaccagauguugauuuaggugacaucucuggcauuaaugcuucaguuguaaacauucaaaaagaaauugaccgccucaaugagguugccaagaauuuaaaugaaucucucaucgaucuccaagaacuuggaaaguaugagcaguauauaaaauggccaugguacauuuggcuagguuuuauagcuggcuugauugccauaguaauggugacaauuaugcuuugcuguaugaccaguugcuguaguugucucaagggcuguuguucuuguggauccugcugcaaauuugaugaagacgacucugagccagugcucaaaggagucaaauuacauuacacauaaacgaacuuauggauuuguuuaugagaaucuucacaauuggaacuguaacuuugaagcaaggugaaaucaaggaugcuacuccuucagauuuuguucgcgcuacugcaacgauaccgauacaagccucacucccuuucggauggcuuauuguuggcguugcacuucuugcuguuuuucagagcgcuuccaaaaucauaacccucaaaaagagauggcaacuagcacucuccaaggguguucacuuuguuugcaacuugcuguuguuguuuguaacaguuuacucacaccuuuugcucguugcugcuggccuugaagccccuuuucucuaucuuuaugcuuuagucuacuucuugcagaguauaaacuuuguaagaauaauaaugaggcuuuggcuuugcuggaaaugccguuccaaaaacccauuacuuuaugaugccaacuauuuucuuugcuggcauacuaauuguuacgacuauuguauaccuuacaauaguguaacuucuucaauugucauuacuucaggugauggcacaacaaguccuauuucugaacaugacuaccagauuggugguuauacugaaaaaugggaaucuggaguaaaagacuguguuguauuacacaguuacuucacuucagacuauuaccagcuguacucaacucaauugaguacagacacugguguugaacauguuaccuucuucaucuacaauaaaauuguugaugagccugaagaacauguccaaauucacacaaucgacgguucauccggaguuguuaauccaguaauggaaccaauuuaugaugaaccgacgacgacuacuagcgugccuuuguaagcacaagcugaugaguacgaacuuauguacucauucguuucggaagagacagguacguuaauaguuaauagcguacuucuuuuucuugcuuucgugguauucuugcuaguuacacuagccauccuuacugcgcuucgauugugugcguacugcugcaauauuguuaacgugagucuuguaaaaccuucuuuuuacguuuacucucguguuaaaaaucugaauucuucuagaguuccugaucuucuggucuaaacgaacuaaauauuauauuaguuuuucuguuuggaacuuuaauuuuagccauggcagauuccaacgguacuauuaccguugaagagcuuaaaaagcuccuugaacaauggaaccuaguaauagguuuccuauuccuuacauggauuugucuucuacaauuugccuaugccaacaggaauagguuuuuguauauaauuaaguuaauuuuccucuggcuguuauggccaguaacuuuagcuuguuuugugcuugcugcuguuuacagaauaaauuggaucaccgguggaauugcuaucgcaauggcuugucuuguaggcuugauguggcucagcuacuucauugcuucuuucagacuguuugcgcguacgcguuccauguggucauucaauccagaaacuaacauucuucucaacgugccacuccauggcacuauucugaccagaccgcuucuagaaagugaacucguaaucggagcugugauccuucguggacaucuucguauugcuggacaccaucuaggacgcugugacaucaaggaccugccuaaagaaaucacuguugcuacaucacgaacgcuuucuuauuacaaauugggagcuucgcagcguguagcaggugacucagguuuugcugcauacagucgcuacaggauuggcaacuauaaauuaaacacagaccauuccaguagcagugacaauauugcuuugcuuguacaguaagugacaacagauguuucaucucguugacuuucagguuacuauagcagagauauuacuaauuauuaugaggacuuuuaaaguuuccauuuggaaucuugauuacaucauaaaccucauaauuaaaaauuuaucuaagucacuaacugagaauaaauauucucaauuagaugaagagcaaccaauggagauugauuaaacgaacaugaaaauuauucuuuucuuggcacugauaacacucgcuacuugugagcuuuaucacuaccaagaguguguuagagguacaacaguacuuuuaaaagaaccuugcucuucuggaacauacgagggcaauucaccauuucauccucuagcugauaacaaauuugcacugacuugcuuuagcacucaauuugcuuuugcuuguccugacggcguaaaacacgucuaucaguuacgugccagaucaguuucaccuaaacuguucaucagacaagaggaaguucaagaacuuuacucuccaauuuuucuuauuguugcggcaauaguguuuauaacacuuugcuucacacucaaaagaaagacagaaugauugaacuuucauuaauugacuucuauuugugcuuuuuagccuuucugcuauuccuuguuuuaauuaugcuuauuaucuuuugguucucacuugaacugcaagaucauaaugaaacuugucacgccuaaacgaacaugaaauuucuuguuuucuuaggaaucaucacaacuguagcugcauuucaccaagaauguaguuuacagucauguacucaacaucaaccauauguaguugaugacccguguccuauucacuucuauucuaaaugguauauuagaguaggagcuagaaaaucagcaccuuuaauugaauugugcguggaugaggcugguucuaaaucacccauucaguacaucgauaucgguaauuauacaguuuccuguuuaccuuuuacaauuaauugccaggaaccuaaauuggguagucuuguagugcguuguucguucuaugaagacuuuuuagaguaucaugacguucguguuguuuuagauuucaucuaaacgaacaaacuaaaaugucugauaauggaccccaaaaucagcgaaaugcaccccgcauuacguuugguggacccucagauucaacuggcaguaaccagaauggagaacgcaguggggcgcgaucaaaacaacgucggccccaagguuuacccaauaauacugcgucuugguucaccgcucucacucaacauggcaaggaagaccuuaaauucccucgaggacaaggcguuccaauuaacaccaauagcaguccagaugaccaaauuggcuacuaccgaagagcuaccagacgaauucgugguggugacgguaaaaugaaagaucucaguccaagaugguauuucuacuaccuaggaacugggccagaagcuggacuucccuauggugcuaacaaagacggcaucauauggguugcaacugagggagccuugaauacaccaaaagaucacauuggcacccgcaauccugcuaacaaugcugcaaucgugcuacaacuuccucaaggaacaacauugccaaaaggcuucuacgcagaagggagcagaggcggcagucaagccucuucucguuccucaucacguagucgcaacaguucaagaaauucaacuccaggcagcaguaggggaacuucuccugcuagaauggcuggcaauggcggugaugcugcucuugcuuugcugcugcuugacagauugaaccagcuugagagcaaaaugucugguaaaggccaacaacaacaaggccaaacugucacuaagaaaucugcugcugaggcuucuaagaagccucggcaaaaacguacugccacuaaagcauacaauguaacacaagcuuucggcagacgugguccagaacaaacccaaggaaauuuuggggaccaggaacuaaucagacaaggaacugauuacaaacauuggccgcaaauugcacaauuugcccccagcgcuucagcguucuucggaaugucgcgcauuggcauggaagucacaccuucgggaacgugguugaccuacacaggugccaucaaauuggaugacaaagauccaaauuucaaagaucaagucauuuugcugaauaagcauauugacgcauacaaaacauucccaccaacagagccuaaaaaggacaaaaagaagaaggcugaugaaacucaagccuuaccgcagagacagaagaaacagcaaacugugacucuucuuccugcugcagauuuggaugauuucuccaaacaauugcaacaauccaugagcagugcugacucaacucaggccuaaacucaugcagaccacacaaggcagaugggcuauauaaacguuuucgcuuuuccguuuacgauauauagucuacucuugugcagaaugaauucucguaacuacauagcacaaguagauguaguuaacuuuaaucucacauagcaaucuuuaaucaguguguaacauuagggaggacuugaaagagccaccacauuuucaccgaggccacgcggaguacgaucgaguguacagugaacaaugcuagggagagcugccuauauggaagagcccuaauguguaaaauuaauuuuaguagugcuauccccaugugauuuuaauagcuucuuaggagaaugacaaaaaaaaaaaaaaaaaaaaaaaaaaaaaaaaa

SEQ ID NO: 10 - RNA, 29903 nt, Severe acute respiratory syndrome coronavirus 2
uuuuuuuuuuuuuuuuuuuuuuuuuuuuuuuuugucauucuccuaagaagcuauuaaaaucacauggggauagcacuacuaaaauuaauuuuacacauuagggcucuuccauauaggcagcucucccuagcauuguucacuguacacucgaucguacuccgcguggccucggugaaaaugugguggcucuuucaaguccucccuaauguuacacacugauuaaagauugcuaugugagauuaaaguuaacuacaucuacuugugcuauguaguuacgagaauucauucugcacaagaguagacuauauaucguaaacggaaaagcgaaaacguuuauauagcccaucugccuuguguggucugcaugaguuuaggccugaguugagucagcacugcucauggauuguugcaauuguuuggagaaaucauccaaaucugcagcaggaagaagagucacaguuugcuguuucuucugucucugcgguaaggcuugaguuucaucagccuucuucuuuuuguccuuuuuaggcucuguuggugggaauguuuuguaugcgucaauaugcuuauucagcaaaaugacuugaucuuugaaauuuggaucuuugucauccaauuugauggcaccuguguaggucaaccacguucccgaaggugugacuuccaugccaaugcgcgacauuccgaagaacgcugaagcgcugggggcaaauugugcaauuugcggccaauguuuguaaucaguuccuugucugauuaguuccugguccccaaaauuuccuuggguuuguucuggaccacgucugccgaaagcuuguguuacauuguaugcuuuaguggcaguacguuuuugccgaggcuucuuagaagccucagcagcagauuucuuagugacaguuuggccuuguuguuguuggccuuuaccagacauuuugcucucaagcugguucaaucugucaagcagcagcaaagcaagagcagcaucaccgccauugccagccauucuagcaggagaaguuccccuacugcugccuggaguugaauuucuugaacuguugcgacuacgugaugaggaacgagaagaggcuugacugccgccucugcucccuucugcguagaagccuuuuggcaauguuguuccuugaggaaguuguagcacgauugcagcauuguuagcaggauugcgggugccaaugugaucuuuugguguauucaaggcucccucaguugcaacccauaugaugccgucuuuguuagcaccauagggaaguccagcuucuggcccaguuccuagguaguagaaauaccaucuuggacugagaucuuucauuuuaccgucaccaccacgaauucgucugguagcucuucgguaguagccaauuuggucaucuggacugcuauugguguuaauuggaacgccuuguccucgagggaauuuaaggucuuccuugccauguugagugagagcggugaaccaagacgcaguauuauuggguaaaccuuggggccgacguuguuuugaucgcgccccacugcguucuccauucugguuacugccaguugaaucugaggguccaccaaacguaaugcggggugcauuucgcugauuuugggguccauuaucagacauuuuaguuuguucguuuagaugaaaucuaaaacaacacgaacgucaugauacucuaaaaagucuucauagaacgaacaacgcacuacaagacuacccaauuuagguuccuggcaauuaauuguaaaagguaaacaggaaacuguauaauuaccgauaucgauguacugaaugggugauuuagaaccagccucauccacgcacaauucaauuaaaggugcugauuuucuagcuccuacucuaauauaccauuuagaauagaagugaauaggacacgggucaucaacuacauaugguugauguugaguacaugacuguaaacuacauucuuggugaaaugcagcuacaguugugaugauuccuaagaaaacaagaaauuucauguucguuuaggcgugacaaguuucauuaugaucuugcaguucaagugagaaccaaaagauaauaagcauaauuaaaacaaggaauagcagaaaggcuaaaaagcacaaauagaagucaauuaaugaaaguucaaucauucugucuuucuuuugagugugaagcaaaguguuauaaacacuauugccgcaacaauaagaaaaauuggagaguaaaguucuugaacuuccucuugucugaugaacaguuuaggugaaacugaucuggcacguaacugauagacguguuuuacgccgucaggacaagcaaaagcaaauugagugcuaaagcaagucagugcaaauuuguuaucagcuagaggaugaaauggugaauugcccucguauguuccagaagagcaagguucuuuuaaaaguacuguuguaccucuaacacacucuugguagugauaaagcucacaaguagcgaguguuaucagugccaagaaaagaauaauuuucauguucguuuaaucaaucuccauugguugcucuucaucuaauugagaauauuuauucucaguuagugacuuagauaaauuuuuaauuaugagguuuaugauguaaucaagauuccaaauggaaacuuuaaaaguccucauaauaauuaguaauaucucugcuauaguaaccugaaagucaacgagaugaaacaucuguugucacuuacuguacaagcaaagcaauauugucacugcuacuggaauggucuguguuuaauuuauaguugccaauccuguagcgacuguaugcagcaaaaccugagucaccugcuacacgcugcgaagcucccaauuuguaauaagaaagcguucgugauguagcaacagugauuucuuuaggcagguccuugaugucacagcguccuagaugguguccagcaauacgaagauguccacgaaggaucacagcuccgauuacgaguucacuuucuagaagcggucuggucagaauagugccauggaguggcacguugagaagaauguuaguuucuggauugaaugaccacauggaacgcguacgcgcaaacagucugaaagaagcaaugaaguagcugagccacaucaagccuacaagacaagccauugcgauagcaauuccaccggugauccaauuuauucuguaaacagcagcaagcacaaaacaagcuaaaguuacuggccauaacagccagaggaaaauuaacuuaauuauauacaaaaaccuauuccuguuggcauaggcaaauuguagaagacaaauccauguaaggaauaggaaaccuauuacuagguuccauuguucaaggagcuuuuuaagcucuucaacgguaauaguaccguuggaaucugccauggcuaaaauuaaaguuccaaacagaaaaacuaauauaauauuuaguucguuuagaccagaagaucaggaacucuagaagaauucagauuuuuaacacgagaguaaacguaaaaagaagguuuuacaagacucacguuaacaauauugcagcaguacgcacacaaucgaagcgcaguaaggauggcuaguguaacuagcaagaauaccacgaaagcaagaaaaagaaguacgcuauuaacuauuaacguaccugucucuuccgaaacgaaugaguacauaaguucguacucaucagcuugugcuuacaaaggcacgcuaguagucgucgucgguucaucauaaauugguuccauuacuggauuaacaacuccggaugaaccgucgauugugugaauuuggacauguucuucaggcucaucaacaauuuuauuguagaugaagaagguaacauguucaacaccagugucuguacucaauugaguugaguacagcugguaauagucugaagugaaguaacuguguaauacaacacagucuuuuacuccagauucccauuuuucaguauaaccaccaaucugguagucauguucagaaauaggacuuguugugccaucaccugaaguaaugacaauugaagaaguuacacuauuguaagguauacaauagucguaacaauuaguaugccagcaaagaaaauaguuggcaucauaaaguaauggguuuuuggaacggcauuuccagcaaagccaaagccucauuauuauucuuacaaaguuuauacucugcaagaaguagacuaaagcauaaagauagagaaaaggggcuucaaggccagcagcaacgagcaaaaggugugaguaaacuguuacaaacaacaacagcaaguugcaaacaaagugaacacccuuggagagugcuaguugccaucucuuuuugaggguuaugauuuuggaagcgcucugaaaaacagcaagaagugcaacgccaacaauaagccauccgaaagggagugaggcuuguaucgguaucguugcaguagcgcgaacaaaaucugaaggaguagcauccuugauuucaccuugcuucaaaguuacaguuccaauugugaagauucucauaaacaaauccauaaguucguuuauguguaauguaauuugacuccuuugagcacuggcucagagucgucuucaucaaauuugcagcaggauccacaagaacaacagcccuugagacaacuacagcaacuggucauacagcaaagcauaauugucaccauuacuauggcaaucaagccagcuauaaaaccuagccaaauguaccauggccauuuuauauacugcucauacuuuccaaguucuuggagaucgaugagagauucauuuaaauucuuggcaaccucauugaggcggucaauuucuuuuugaauguuuacaacugaagcauuaaugccagagaugucaccuaaaucaacaucuggugauguaugauucuuaaaauauuuaucuaacuccuccuugaaugagucuaauucagguugcaaaggaucauaaacuguguuguugacaauuccuauuacaacaucacaguuaccagacacaaauguguugucuguaguaaugauuugugguucauaaaaauuccuuuguguuacaaaccagugugugccauuugaaacaaagacaccuucacgaggaaagugugcuuuuccaucaugacaaauggcaggagcaguugugaaguucuuuucuugugcagggacauaagucacaugcaagaagacuacaccaugaggugcugacugagggaaggacauaagaugauagcccuuuccacaaaaaucaacucuuuuugauuguccaaguacacacucugacauuuuaguagcagcaagauuagcagaagcucugauuucugcagcucuaauuaauuguugagucacauaugucugcaaacuuugaagucugccugugaucaaccuaucaauuugcacuucagccucaacuuugucaagacgugaaaggauaucauuuaaaacacuugaaauugcaccaaaauuggagcuaaguuguuuaacaagcguguuuaaagcuugugcauuuugguugaccacaucuugaaguuuuccaagugcacuugcuguggaagaaagugagucuugaauuuugccaauagcacuauuaaauugguuggcaaucaauuuuugguucucauagagaacauucuguguaacuccaauaccauuaaaccuauaagccauuugcauagcaaaugguauuuguaaugcagcaccugcaccaaagguccaaccagaagugauuguacccgcuaacagugcagaaguguauugagcaaucauuucaucugugagcaaagguggcaaaacaguaaggccguuaaacuuuugugcacaaaugaggucucuagcagcaauaucaccaaggcaaucaccauauuguuugaugaagccagcaucugcaagugucacuuuguugaaaaguagaucuucaauaaaugaccucuugcuugguuuugauggaucugguaauauuugugaaaaauuaaaaccaccaaaaucuuuaauuggugguguuuuguaaauuuguuugacuugugcaaaaacuucuuggguguuuuugucuuguucaacagcuauuccaguuaaagcacgguuuaauuguguacaaaaacugccauauugcaacaaaagauugcugcauucaguugaaucaccacaaauguacauuguacaaucuacugaugucuuggucauagacacugguagaauuucugugguaacacuaauaguaaaauuuguggguauggcaauagaguuauuagaguaagcaacugaauuuucugcaccaagugacauaguguaggcaaugauggauugacuagcuacacuacgugcccgccgaggagaauuagucugagucugauaacuagcgcauauaccugcaccaauggguaugucacacucauaugaguuguugacauguucagccccuauuaaacagccugcacguguuugaaaaacauuagaaccuguagaauaaacacgccaaguaggaguaaguugaucugcaugaauagcaacagggacuucugugcaguuaacauccugauaaagaacagcaaccugguuagaaguauuuguuccugguguuauaacacugacaccaccaaaagaacaugguguaaugucaagaaucucaagugucuguggaucacggacagcaucaguagugucagcaaugucucugccaaauuguuggaaaggcagaaacuuuuuguuagacucaguaagaacaccugugccuguuaaaccauugaaguugaaauugacacauuuguuuuuaaccaaauuaguagacuuuuuagguccacaaacaguugcuggugcauguagaaguucaaaagaaaguacuacuacucuguaugguugguaaccaacaccauuaguggguuggaaaccauaugauuguaaaggaaaguaacaauuaaaaccuucaacaccauuacaaggugugcuaccggccugauagauuucaguugaaauaucucucucaaaagguuugagauuagacuuccuaaacaaucuauacagguaauuauaauuaccaccaaccuuagaaucaagauuguuagaauuccaagcuauaacgcagccuguaaaaucaucugguaauuuauaauuauaaucagcaaucuuuccaguuugcccuggagcgauuugucugacuucaucaccucuaauuacaaaugaaucugcauagacauuaguaaagcagagaucauuuaauuuaguaggagacacuccauaacacuuaaaaguggaaaaugaugcggaauuauauaggacagaauaaucagcaacacaguugcugauucucuuccuguuccaagcauaaacagaugcaaaucugguggcguuaaaaacuucaccaaaagggcacaaguuuguaauauuaggaaaucuaacaauagauucuguugguuggacucuaaaguuagaaguuugauagauuccuuuuucuacagugaaggauuucaacguacacuuuguuucugagagagggucaagugcacagucuacagcaucuguaaugguuccauuuucauuauauuuuaauagaaaaguccuagguugaagauaacccacauaauaagcugcagcaccagcuguccaaccugaagaagaaucaccaggagucaaauaacuucuauguaaagcaaguaaaguuugaaaccuagugauguuaauaccuauuggcaaaucuaccaaugguucuaaagccgaaaaacccugagggagaucacgcacuaaauuaauaggcgugugcuuagaauauauuuuaaaauaaccaucaauauucuuaaacacaaauucccuaagauuuuugaaauuacccuguuuuccuucaagguccauaagaaaaggcugagagacauauucaaaagugcaauuauucgcacuagaauaaacucugaacucacuuuccauccaacuuuuguuguuuuugugguaauaaacacccaaaaauggaucauuacaaaauugaaauucacagacuuuaauaacaacauuaguagcguuauuaacaauaaguagggacugggucuucgaaucuaaaguaguaccaaaaauccagccucuuauuauguuagacuucucaguggaagcaaaauaaacaccaucauuaaaugguaggacaggguuaucaaaccucuuaguaccauuggucccagagacauguauagcauggaaccaaguaacauuggaaaagaaagguaagaacaaguccugaguugaauguaaaacugaggaucugaaaacuuugucaggguaauaaacaccacgugugaaagaauuaguguaugcaggggguaauugaguucugguuguaagauuaacacacugacuagagacuaguggcaauaaaacaagaaaaacaaacauuguucguuuaguuguuaacaagaacaucacuagaaauaacaacucuguuguuuucucuaauuauaagucuaccuuuacuaagaagagauaaaaucauaucauugauuugaccuucuuuuaaagacauaacagcaguaccccuuaauuuaaggggaaauuuacucaugucaaauaaagaauaggaagacaacugaauuggauuuguauuccuccaaaauauguaauuugcaugcaugacauaaccaucuauuuguucgcgugguuugccaagauaauuacauccaauuaaaaaugcuucagaugaugacgcauucacauuaguaacaaaggcuguccaccaugcgaagugucccaugagcuuauaaagaucagcauuccaagaauguucuguuaucuuuauagccacggaaccuccaagagcuagcuuuuguuguauaaacccacaaauguaagugaaaaaacccucuuuagagucauuuucuuuuguaacauuuuuagucuuagggucguacauaucacuaauaaugagaucccauuuauuagcuguauguacaguugcacaaucaccaaucaaaguugaaucugcaucagagacaaagucauuaagaucugaaucgacaagcagcguacccguaggcaaccacugucuuaaaacagcuguaccuggugcaacuccuuuaucagaaccagcaccaaaauguauaacucucauauuauaggguacagcuaauguuaauguguuuaaauauugacacaguugaguauauuuugcgacauucaucauuaugccuuuagguaauguugcacuaucaccauaauuuugaaggucacacuuuucuaauagcauucuuugcauuuuguaaagauuaggcauagcaacacccgguugccacgcuugacuagauuguaauuuuggguaaaauguuucuacauggccaucuuuacaccaaagcauaaaugaaauuucuguauagucaauagucacuuugacaaccuuagaaacuacagauaaaucuugggauuuuauuauuucaacaaaaucaucaaguaauaaaucaauaacagaacacacacacuuagaugaaccuguuugcgcaucuguuaugaaauaguuuuuaacuguacuguccauaggaauaaaaucuucuaauucaaaaggugauuccuuaaaacguuuagcuaguccaaucaguagauguaaaccaccuaacugacuaugacuaaaaucuccauaaacgauauguucgaaggcauagccuucuaauuuauaccguucaaugaauucauccauagcuaauucuaagaaaucaauuuccauuugacuccuggguuuaaauucuuguaaauuucuacucugaguaaaguaaguuucagguaauuguuggacaacaccaucaacuuucuuauaauaauugaacuguguuuuuacggcuucuccaauuaaugugacuccauuaagacuagcuuguuugggaccuacagaugguuguaaaccuuuaacacuaccuucuguaauaagaacaccauuacgggcauuucuaaauaagucuacuugaccaucaacucuaccaucaaaaaagacagugaguggugcacaaaucguuucaguugguuucuuggcuaugucagucauagaacaaacaccaauaguagauauaugugcuggagcaucucuuuuguagucccagaucacaguauuagcagcaauguccacacccaaauuauugaguauuuucaccucugguacugguuuaauguugcgcuuagcccaaagcucaaaugcuacauuaacagguaauguuguuuuauuuucaaacaauucuacaucaacaccaucaacuuuuguguaaacaguguuauuaaugauagaaacugguacuucacccuguuguccaucaaagugucccuuauuuacaacauuaaaagccacauuuucuaaacucugaagucuuguaaaaguguuccagagguuauaaguaucaaauuguuuguaaacccacaagcuaaagccagcugagaucaucauguuauaagcaucgagauacaaucuguacucauuagcaugaugucuacagacagcaccaccuaaauugcaacguguuauacacguagcagacuuuagugguacauaaucuauaucugacacuacuuguuuuccaugagacucacauggacugucagaguaauagaaaaaugguaauuguuuuaaauuaacaaaagcacuuuuaucaaaagcugguguguggaaugcauguuuauuuacauacaaacugccaccaucacaaccaggcaaguuaagguuagauagcacucuagugucaaaucuacaaacaauggaauuagcaggauaucuaucgacauugcaauuccaaaauaggcauacaccaucugugaauuugucagaauguguggcauaagaauagaauaauucuucuauuuuauaagcuuugucacuacaaggcugugcaucauagaacuuccauucuacaucagcuugagguacacacuuaauagcuuuaggguuaccaaugucgugaagaacugggaauuugucugcuaauaaugcagcuuuaacaaccauguguugaaccuuucuacaagccgcauuaaucuucaguucaucaccaauuauaggauauucaauaguccagucaacacgcuuaacaaagcacucguggacagcuagacaccuagucaugauugcaucacaacuagcuacaugugcauuaccauggacuugacaauacagaucaugguugcuuuguagguuaccuguaaaaccccauuguugaacaucaaucauaaacggauuauagacguaaucaaauccaauagaaugaugccaacaggcauaagugucugaagcaguggaaaagcauguggcacgucuaucacauagacaacaggugcgcucagguccuauuuucacaaaauacuucauagaugucaacucaaagccaugugcccauaagacaaauacgacucugucagagagauuuuuaagugugucacuuaacauuuguacaaucuuuauacgcacuacauuccaaggaaguccuuuguacauaagugguaugagguguuuaaauugaucuccaggcggugguuuagcacuaacucuggaaaaaucuguauuauuagguguaucaacauaaccuguagguacagcaacuagguuaacaccuguagaaaaaccuagcuguaaagguaaauugguaccaacagcuucucuaguagcaugacaccccucgacaucgaagccaauccaugcacguacaugucuuauagcuucuucgcgggugauaaacauguuaggguaaccauuaacuugauaauucauuuuaaaacccaucauagagaugagucuucuauaggucauguccuuagguaugccagguaugucaacacauaaaccuucaguuuugaauuuagugucaacacugagguguguaggugccuguguaggauguaacccagugauuaccuuacuacaaucuuuaaagaguccuguuacauuuucagcuuguaaaguugccacauuccuacguggaauuucaagacuuguaaauugcaacuugucauaaaggucucuaucagacauuaugcaaaguaugccuacuuuugcucugguaauagcaacauuaaaucuguuuacauuacaagagugagcuguuucagugguuugagugaauaugacauagucauauucugagcccugugaugaaucaacaguuugaguugguagucccaaaaucuuugaggcuacagcauucugugaauuauaaggugaaauaaagacagcuuuucuccaagcaggguuacguguaaggaauucucuuaccacgccuauuuguggccuguuaauugcagaugaaacaucaugcgugauaacacccuuauaaaacauuuuaaagcauugagcugauuugucuuuaugugcuuuaagcuuauuaucauaaaccaaagcacucacagugucaacaauuucagcaggacaacgccgacaaguuccgaggaacaugucuggaccuauaguuuucauaagucuacacacugaauugaaauauucugguucuagugugcccuuaguuagcaaugugcguggugcagguaauugagcagggucgccaauguacacauagugcuuagcacguaaucuggcauugacaacacucaaaucauaauuuguggccauugaaauuucaucaaagacaacuauaucugcugucgucucaggcaaugcauuuacaguacaaaagacauacuguucuaauguugaauucacuuugaauuuaucaaaacacucuacacgagcacgugcagguauaauucuacuacauuuaucuauaggcaaauauuuuaaugccuucucacauagugcaucaacagcggcaugagagcaagcuguauacacuaugcgagcagaaggguaguagagagcuaggccaauagcaaaaugacucuuaccaguaccagguggucccuggaguguagaauacuuuugcauaccaaccuuuugauaauuugcaacauugcuagaaaacucaucugagauauugaguguuggguauaagccaguaauucuaacauagugcucuuguggcacuaguguaggugcacuuaauggcauuacuguaugugaugucagcacaaaauaaucaccaacauuuaauuuguaaguuguuguaccucgguaaacaacagcaucaccauagucaccuuuuucaaagguguacucuccuauuuguacuuuacuguuuuuaguuacacgauaaccaguaaagacauaauuucgguuaagugguggucuagguuuaccaacuucccaugaaagauguaauucucugucagacagcacuucacguacaguagcaauaccauaagacaguuuaaaugucuccucaguagcuuugagcguuucugcugcaaaaagcuugagucuuucaguacagguguuagcuaaaauguaaucaccagcauuuguccagucacauguugcaauugcauuaaagucaguaacauuaucgcuaccaacacauguauuuuuauauaaaccaaaaacuuguccauuagcacacaauggaaaacuaaugggugguuuaugugauuuacaauaauagcucauaccuccuaaguaaaguugagucacaucugugacaucacaaccuggagcauugcaaacauacggauuaacagacaagacuaauuuaugugauguugauaugacauggucguaacagcauuuacaacauaagaauggucuacguaugcaagcaccacaucuuaaugaagucugugaauugcaaagaacacaagccccaacagccuguaagacuguaugcgguguguacauagccucauaaaacucagguucccaauaccuugaaguguuaucauuaguaagcauaacagaauacaugucuaacauguguccuguuaacucaucauguagcuuucuuauguauuguaaguacaaaugaaagacaucagcauacuccugauuaggauguuuaguaaguggguaagcaucuauagcuaaagacacgaaccguucaaucauaaguguaccaucuguuuuuacgauaucaucuacaaaacagccggccccuaggauucuugauggaucuggguaaggaagguacacauaaucaucacccuguuuaacuagcauuguauguugagagcaaaauucaugagguccuuuaguaaggucagucucaguccaacauuuugcuucagacauaaaaacauuguuuugauaauaaagaacugacuuaaaguucuuuaugcuagccacuagaccuugagaugcauaagugcuauugaaacacacaacagcaucgucagagaguaucaucauugagaaauguuuacgcaaauaugcguaaaacucauucacaaagucugugucaacaucucuauuucuauagagacacucauaaagucuguguuguaaauugcggacauacuuaucggcaauuuuguuaccaucaguagauaaaagugcauuaacauuggccgugacagcuugacaaauguuaaaaacacuauuagcauaagcaguuguggcaucuccugaugagguuccaccugguuuaacauauagugaaccgccacacaugaccauuucacucaauacuugagcacacucauuagcuaaucuauagaaacggugugacaagcuacaacacguuguauguuugcgagcaagaacaagugaggccauaauucuaagcauguuaggcauggcucuaucacauuuaggauaaucccaacccauaaggugaggguuuucuacaucacuauaaacaguuuuuaacauguugugccaaccaccauagaauuugcuuguuccaauuacuacaguagcuccucuaguggcggcuauugauuucaauaauuuuugaugaaacugucuauuggucauaguacuacagauagagacaccagcuacggugcgagcucuauucuuugcacuaauggcauacuuaagauucauuugaguuauaguagggaugacauuacguuuuguauaugcgaaaagugcaucuugauccucauaacucauugaaucauaauaaagucuagccuuaccccauuuauuaaauggaaaaccagcugauuugucuagguuguugacgaugacuugguuagcauuaauacagccaccaucguaacaaucaaaguacuuaucaacaacuucaacuacaaauaguaguugucugauaucacacauuguugguagauuauaacgauaguagucauaaucgcugauagcagcauuaccauccugagcaaagaagaaguguuuuaauucaacagaacuuccuuccuuaaagaaacccuuagacacagcaaagucauagaagucuuuguuaaaauuaccggguuugacaguuugaaaagcaacauuguuaguaagugcagcuacugaaaagcacguagugcguuuaucuaguaauagauuaccagaagcagcgugcauagcagggucagcagcauacacaaguaauuccuuaaaacuaagucuagagcuauguaaguuuacauccugauuauguacaacaccuagcucucugaagugguauccaguugaaacuacaaauggaacaccaucaacaaauauuuuucucacuagugguccaaaacuuguaggugggaacacuguagagaauaaaacauuaaaguuugcacaaugcagaaugcaucugucauccaaacaguuaacacaauuugggugguaugucugaucccaauauuuaaaauaacggucaaagaguuuuaaccucucuuccgugaagucauauuuuaacaaaucccacuuaauguaaggcuuuguuaagucagugucaacaugugacucugcaguuaaagcccuggucaagguuaauauaggcauuaacaaugaauaauaagaaucuacaacaggaacuccacuaccuggcgugguuuguaugaaaucaccgaaaucauaccaguuaccauugagaucuugauuaucuaaugucaguacaccaacaauaccagcauuucgcauggcaucacagaauuguacuguuuuuaacaaagcuuggcguacacguucaccuaaguuggcguauacgcguaauauaucuggguuuucuacaaaaucauaccaguccuuuuuauugaaauaaucaucaucacaacaauuguaugugacaaguauuucuuuuaaugugucacaauuaccuucaucaaaaugccuuaaagcauagacgaggucugccauuguguauuuaguaagacguugacgugauauaugugguaccaugucaccgucuauucuaaacuuaaagaagucauguuuagcaacagcuggacaauccuuaaguaaauuauaaauuguuucuucauguugguaguuagagaaagugugucucuuaacuacaaaguaagaaucaauuaaauugucaucuucguccuuuucuuggaagcgacaacaauuaguuuuuaggaauuuagcaaaaccagcuacuuuaucauuguagaugucaaaagcccuguauacgacaucaguacuagugccugugccgcacgguguaagacgggcugcacuuacaccgcaaacccguuuaaaaacgauugugcaucagcugacugaagcauggguucgcggaguugaucacaacuacagccauaaccuuuccacauaccgcagacgguacagacuguguuuuuaaguguaaaacccacagggucauuagcacaaguuguagguauuuguacauacuuaccuuuuaagucacaaaauccuuuaggauuuggaugaucuauguggcaacggcaguacagacaacacgaugcaccaccaaaggauucuugauccauauuggcuuccgguguaacuguuauugccugaccaguaccaguguguguacacaacaucuuaacacaauuagugauugguugucccccacuagcuagauaaucuuuguaagcuuuagcagcaucuacagcaaaagcacagaaagauaauacaguugaauuggcaggcacuucuguugcauuaccagcuuguagacguacuguggcagcuaaacuaccaaguaccauaccucuauuuagguuguuuaauccuuuaauaaaguauaaauacuucacuuuaggaccuuuaggugugucuguaacaaaccuacaaggugguuccaguucuguauagauaguaccaguuccaucacucuuagggaaucuagcccauuucaaauccuguaaaucggauaacagugcaaguacaaaccuaccucccuuuguuguguuguaguaagcuaacgcauugucaucagugcaagcaguuuguguaguaccggcagcacaagacaucugucguagugcaacaggacuaagcucauuauucuguaauuugacagcagaauuggcccuuaaagcuguuacaauaagaggccaugcuaaauuaggugaauuguccauacuaauuucacuaaguugaacaauuuuacuaucugcaucuacaaccuguuggauuucccacaaugcugaugcauaaguaaauguuguaccaucacacguauuuuuauauguguuauagucugguaugacaaccauuaguuuggcugcuguuguaagagguauuauguucaagggaacacaaccaucucuugcauuguugauaauguuguugagugcaucauuauccaacuuucuaagcauagugaaaagcauugucugcauagcacuaguaacuuuugcccucuuguccucagaucuagccuguuuauacauuugggucauagcuugaucagccaucuuuuccaacuuacguugcauggcugcaucacggucaaauucagauuuagccacauucaaagacuucuucaacuuuuuaagaacaacuucagaaucaccauuagcaacagccugcucauaagcuucuugagcaguagcaaaagcugcauaugauggaagggaacuaaacucugaggcuauagcuuguaagguugcccuguuguccagcauuucuucacaaagcuuguuuaugucuacagcacccugcauggaaagcaaaacagaaaguagugaaaccauuuuuucaaaggcuucaguaguaucuuuagcuaagagaaugucauuguguaacuggacacauugagcccacaauuuagaugaugauucuacucugaguuguugcaaaacugagaguaagacuacugaugugcacuuuacaucugacauuuuagacuguacaguggcuacuuugauacaagguuugccaccaacacccaacaauuuaauguugaguuugaaggcaucuaugcuauucuugggugggaguagucccugugaauucauauaucuaaacuccuguguagaaacuaaguaaucauaaacaccaagagucagucuaaaguagcgguugaguaaacaaaagaggccaaaguaacaaguacaaaaauagccuaagaaacaauaaacuagcauuauacacugaaguguauuaccaguuaugaagaaaauagggcaauacucaacacacauaaaaacaauaccucuggccaaaaacaugacaguuguaacuacaccugaguaguuagaaguaacagagauuauaagagcccacauggaaauggcuugaucuaaagcauuaccauaauaaacuuuauaaacgagugucaagacauucauaaguguccacacucuccuagcaccaucaucauacacaguucuugcugucauaaggauuaguaacacuacagcugaugcauacauaacacagucuuuuagcuuaaaaccagacaaacuaguaucaaccauauccaaccaugucauaauacgcaucacccaacuagcaggcauauagaccauauuaaaauaagcuacaguggcaagagaagguaacaaaaacaaacagagaaaugcaugcuuauguuugacaaacaucauugcaaaagcagacauagcaauaauacccauagcaaaagguaaaaaggcauuuucauacaaaaaaaagaacaaagaccauugaguacucuggacuaaaacuaaaagugaagucaaaauugugaguaacaaccagugguguguacccuugauuguucuuuucacugcacuuuggaaaguaacaccugagcauugucuaacaacaucaaaagguguaaauucaucuucuaauaaagcacuacccaauaugguacguccauucauaccauuuugcaguaauucuuuuaaugaagcacacauaucuaaaacggcaauuccaguuugagcagaaagagguccuaguaugucaacauggucuuguguuagagguucauaauuguacuucauagccacaagguuaaagucauuaagaguugugguaaaucgauugagaaaccaccugucuccauuuauaacagcagcguacaaccaagcuaaaacauuaacuguaauaguuguguccguaccagcugcuugugcuguuugccugucaacaaaagguccauaaaaguuaccuucuaagucugugccagcaugaacuccaguugguaauuccauauggugcauguaacaaaaagagacacagucauaaucuauguuaaaaccaacacuaccacaugaaccauuaaggaaugaacccuuaauagugaaauugggccucauagcacauugguaaacaccagauggugaaccauuguaacaagcuaacacugaaaaagucuguccugguugaaugcgaacaaacuuauacuuaggugucuuaggauuggcuguaucaaccuuaagcuuaaguacacaauuuugcauagaauguccaauaacccugaguugaacauuaccagccuguaccaagaaauuaugauuagacuuacgaaugaguaaaucuucauaauuaggguuaagcaugucuucagaggugcagaucacaugucuuggacaguaaacuacgucaucaagccaaagaccguuaaguguaguuguaccacaaguuacuuguaccauacaacccucaacuuuaccagaugggaaugccauuuuucuaaaaccacucugcaaaacagcugaggugauagagguuuguggugguugguaaagaacaucagaaccugaguuacugaagucauugagagccuuugcgagaugacaacaagcagcuucucuguagcuaguuguauccauugcuccacuaaaauacuuguacuuauuauaaagagcuaaguaucuauuauauugcguaagagguaauagcacaucacuacgcaacuuuagauacauuucuuuauuuaacaaaaaggugcacagcgcagcuucuucaaaaguacuaaaggaaacaccauuaaagacuacacgucucuuuagguaauuacuaaagaaccaauagaaaugcuuuguggaaauacaaaugauauaagcaauuguuauccagaaagguacuaaaggugugaacauaaccauccacugaauaugugcuaaaaaagaaacaucauuaguaagauaaaaugucaaguacaaguaaauaacagaauaaacaccagguaagaaugaguaaacugguguuaaacagaguacagugaaugacauaaggaauaguaaaguauuaaaggcaacuacaugacuguauucaccaaaagcucuucuaaaccucauaaaauaguaggcaaggcauguuacuacgauagcuacaauaccaccagcuacuauagaugcugauauguccaaagcaccaauagguugaauuagugguguaaacauauuaguaaguaaauuuacagcaucuacaccacagaaaacuccugguaaagaucuguaauaaucauuguuaaguacccaucuaccacuaguagauacacaaacaccagcuucugaucuuucacaagugccgugccuacaguacucagaaucaaaaguuguuaccacucuaacagaaccuucaagguagguguuaggaaauugaauaauagagccauccaugagcacauaacgugugucagggcguaaacuuucauaagcaacagaaccuucuaguacauugguaucauaacaauaugguacuggcuuaccagaagcaucuuuaaaaauuguacauucagcagccaaaacacaagcugauguugcaaagucaguguacucuauaaguuuugaugguguguaacagauguuaccaacugcacuaaaaacucuagguaagaaaugcaaaaagucaccauuaguugugcguaauaucgugccaggcaaaccaggcacgacaaaacccacuucucuuguuaugacugcagcaaucaaugggcaagcuuugucauuaguauaacuaccaccacgcuggcuaaaccaugugucaaaaucagcauguuuguuagcaaaacaaguaucuguagaugcuaugucacgagugacaccaccaucaauagccuuguauccuaugauuucacuugaaaagucaguauguuuagacaugacaugaacagguguuauuaaauagaaaauagcagcaacaaaaaggaacacaaguguaacuuuaauuaacugcuucaaccaauuauuaacaauuuuaccacccuuaagugcuaucuuuguuguuacaacauuaacaacuugucuaguaguugcacaugucaacuuaaaagguaaguuauucuuuuuagcagcacuacguauuuguuuucguaguuguucagacaaugacaugaaaucuuuaacguuccauaucaaagcaauguugugacuuuuugcuaccugcgcauuaauaugacgcgcacuacagucaauacaagcaccaaggucacggggugucauguuuucaacuuuguuauaggugagcauauaguuauuacaacuaucgccaguaacuucuaugucagauugaugugacaauuuaagacauucaacaacaucuuuaguuucuacaucugaaucaacaaacccuugccgagcugcugaaauaaaaguagauaagacauugucuaaggacacauucuuugcaaguucagcuucugcaguugcaacuaguguuuugaguuuuuccauugguacguuaaaaguugaugaaaacguauuaacguaagcaucaaacauuuuaacugcaacuuccgcacuaucaccaacaucagacacuaaugccugaucuaguaacaguauagguugacacauaagcugacuguaguaaacagacgcugauuuugcagaugauucuucacauuuugauuuaccaucaaaaacuauaacauuaauaggcaaugaaccuuuaguguuauuagcucucagguugucuaaguuaacaaaaugagagagagaaugucuuucauaagucuuuugaccagcuuuaucaaaguaaagauggauggaaccauucuucacuguaacacuaucaacgauguaagaagacuggucaguaggauuuauuggucuuuuaaacuguagugacaagucucucgcaacuucaucacuaauaaauguacuaccagcacagaauguaucacaauuaacacaauuccaauuguguaguuugcaaaagccuuuaccuccauuagcauagacauaaaaggaccuucuaacaccauuaacaauaguuguacauucgacucuuguugcucuauuacguuuguaacacaucauacaaguugaugaauuacaaccgucuacaacaugcacauaacuuuuccauacauaauaaaaugaugcaaagaagauguacauucuaaccauagcugaaaucggggccauuuguacaagauuaauuauuaaccacauaagccaagaauuacuaauaaaauguacugcaaaauagcugaaaaacaauugcaugauugcagccaauccaaguacauagaaaaaccuagugaaaagaauauaugccaaaaaccacucugcaacuaagccaaaagcaguuaaaucccauuuaaaagaugaaaugguaauuuguauaguuucuaaagaaggauaggugucuaaagaaucuaaaccacuaagacaaacacuacaagguauagaaccaguacaguagguugcaauagugacauuaguagaguucaaauagccuucucuguaaccaguacaguaagaaggcaugccuaaauuagacauuaaaacaccuaaagcagcgguugaguagauuaaagaaccuaggcaaacacuuaauaguaaaaaccaaauuauaauauuuaucaguuuagaaaaauuaggugacuucaaauaauuaaaugaagccucuagacaaaauuuaccgacacucuuaacaguauucuuugcuauaguagucggcauagaugcuuuaauucuagaauuuguacuucuaguaaaaguacacaauuguagcaauaaaguaaagaaauaaggcauauaauuaguacaaacacgguuuaaacaccguguaacuauguuaguaguuguacuaacaacuuuguuaagaaaaggcuuagcauaauuagcuauaguaucccaagggacacuauuaacagcagcuaaaccaugaguagcaaggguuuucaaaccuaauacucuagauaauucauuagguuucuuaauaguaagacuagaauugucuacauaagcagccauuagaucuguguggccaaccucuucuguaauuuuuaaacuauuauuugcugguuuaaguauaaugucuccuacaacuucgguaguuuucacauuacacucaagaacgucuuucuguaugguaggauuuuccacuacuucuucagagacugguuuuagaucuucgcaggcaagauuauccauucccugcgcguccucugacuucaguacaucaaacgaauuugauguuucaacugguuuugugcuccaaagacaacguauacaccagguauuugguuuauacguggcuuuauuaguugcauuguuaacaugccaaacaauagguuuauguaacaauuuagcuccuuucuuaaaagaggguguguaguguuuauaaucaauagccaccacaucaccauuuaagucagggaaaaauguaacuuuaagcucucuugaagcagguuucuuauaaccaguuaacugguuuaaaucaucagcaaauuugauauuaucacauacaaacuuaaaauuaucgaagcuugcguuuggauaugguugguuugguacaagaucaauugguugcucugugaaauaagaauugucuuucuuauaauaauuguccaacuuagggucaauuucuguacaaacaacaccauccaauuuauaaguaacugguuuuaugguuguuguguaacuguuuucuuuguagaaaacauccguaauaggaccuuuguauucugaggacuuuguaaguaaagcaccgucuaugcaauacaaaguuucuuuagaaguuauauguuuauagugaccacacugguaauuaccaguguacucacuagcacaaguaaauguaccaugcuuaaguucauacugagcagguggugcugacaucauaacaaaaggugacuccuguuguacuagauauuuuguagcuuguuuaccacacguacaagguaucugaacaccuuucuuaaauuguucauaagaaagugugcccauguacauaacagcuucuacacccuuaaggguugucugcuguuguccacaaguuuuacacaccacguucaagacucuuuugcaagaaucuaaauuggcauguugaaacaaguaacucauuguuucucuaacaucaccuaacucaccuacugucuuauuacaguaggcuaagauaagugcacaaaaguuagcagcuucaccagcccuugcucuguaauaagcaucuuguagagcagguggauuaaacuucaacucuauuuguuggaguguuaacaaugcaguggcaagauaacaguuguuaucugcccauuuaauagaaguuaaaccauuaacuuguggguauuuccacuuuuuagugugauuuaaugcugacauguaccuacccagaaaacuaggaucaguugugugguaguacucaaaagccucaacacguagagugucaucauuagguaaaacauaaaauguuuuaccuucaugugaauuaugagguuuuauuuuaguaacaucagcuccauccaaauaaguuggaccaaacuguuguccauaugucauugacauguccacaacuugcguguggagguuaauguugucuacuguuguaaacaccuuaauaguccucacuucucucaaagaaagaagugucuuaagauugucaaaggugauaacuucaccaucuagguggaaugugguaggauuacuaguguaauauacacuuuuaucaccucucuuaagaaauucuauaccuaguuguguagauuguccagaauaggaccaaucuuuauaggaaccagcaagugagaugguuucaauaaaauguucuucagguguuuuagaagaagaaguaagauaaccauuauacgcuguaacagcaucaggugaagaaacagaaacuguagcuggcacuuugagagaucucauauaccgagcagcuucuuccaaauuuaagccauguguuacauagccaaguggcauuguaacaagaguuucauuuagaucguuaaguguguugauaagugacgcuacaguuguuuuacugguguaaaaguaaaaucuagcaccauaaucaaccacacccucuuguauuuuaauacccuuauauuuacgcuguauaguugaaacuauggcuuuaguuuccacacagacaggcauuaauuugcguguuucuucugcaugugcaagcauuucucgcaaauuccaagaaacaguuccaagaauuucuugcuucucauuagagauaauagaugguagaauguaaaaggcacuuuuacacuuuuuaagcacugucuuugccuccucuacaguguaaccauuuaaacccugacccggguaagugguuauauaauugucuguuggcacuuuucucaaagcuuucgcuagcauuucaguagugccaccagccuuuuuaguagguauaaccacagcaguuaaaacacccucuugaacaacaucacccacuauauauggagcaucuuucuuuaagaaagugaugucaaugucacuaacaagaguggcagaaucuggaugaagauugccauuaaugucaauauaaaguaacaaguuuucugugaggaacuuaguuucuuccagaguuguuguaacuucuucaacacaagcuuugauuuucuuaucaucuuguuuucucuguucaacugaagguuuacuuucaguuauaaauggcuuaacuuccucuuuaggaaucucagcgaucuuuuguucaacuugcuuuucacucuucauuuccaaaaagcuugaaacaaguuugucauagagauuuuuaucaaagacagcuaaguagacauuugugcgaacaguaucuacacaaacucuuaaagaauguauagggucagcaccaaaaauaccagcugauaauaauggugcaaguagaacuucgugcugauuaaaauuuucauaagcacucuuaagaaguugaaugucuucaccuuuguuaacauuugggccgacaacaugaagacaguguuuagcaagauuguguccgcuuaaaacacaacuaccacccacuuuaagugguccauuaguagcuauguaaucaucagauucaacuugcauggcauuguuaguagccuuauuuaaggcuccugcaacaccuccuccauguuuaagguaaacauuggcugcauuaacaaccacuguugguuuuaccuuuuuagcuucuuccacaaugucugcauuuuuaauguauacauugucaguaaguuuuaaauaaccacuaaaacuauucacuucaauagucugaacaacugguguaaguuccaucucuaauugagguugaaccucaacaauuguuugaauaguaguugucugauuguccucacugccgucuuguugaccaacaguuuguugacuaucaucaucuaaccaaucuucuucuugcucuucuucagguugaagagcagcagaaguggcaccaaauuccaaagguuuaccuugguaaucaucuucaguaccauacucauauugaguugauggcucaaacucuucuucuucacaaucaccuucuucuucauccucaucuggaggguagaaagaacaauacauaugugaagccaauuuaaacucaccagacucaucaaauaaguaguauguagccauacuccacucaucuaaaucaaugcccagugguguaaguaauucagauacugguugcaaaguuuuuaugacagcaucugccacaacacaggcgaacucauuuacuucuguaccgaguucaacuguauaggcagagcacuucucauuaaguacuuuaucaauccuuucaucaaguucaaaagugauauucacacucuuguaaccuugcacuucuaucacagugucaucaccaaaaguaaccuuuguuggugcaccgccuuugagugugaagguauuguuuguuaccaucauauuaggugcaagggcacaguacuuuucugugucuuugauuucgagcaacauaagcccguuaauacaaacugguguaccaaccaauggagcuucaacagcuucacuaguagguuguucuaaugguuguaaaucaccaguuuucaagacaacuuccucuguuaacacuucugugggaaguguuucucccucuaagaagauaauuucuuuuggggcuuuuagaggcaugaguaggccaguuucuucucuggauuuaacacacuuucuguacaaucccuuugagugcgugacaaauguuucaccuaaauucaaggcuuuaaguuuagcuccaccaauaaugauagagucagcacacaaagccaaaaauuuauuuacaagcuuaaagaaugucugaacacucuccuuaauuuccuuugcacaggugacaauuuguccaccgacaauuucacaagcacagguugagauaaauuuaacaauuucccaaccgucucuaagaaacucuacaccuuccuuaaacuucucuucaagccaaucaaggacggguuugaguuuuucauaaacagugccaaagauguuaguuagccacugcgaagucaacugaacaacaccaccuguaauguaggccauuacaacuagauuguuaguagccaaaucagaugugaacaucauagcaucaaugagucucagugaauacugugaaauuccaucuaguauuguuauagcggccuucuguaaaacacgcacagaauuuugagcaguuucaagagugcgggagaaaauugaucguacaacacgagcagccucugaugcaaaugcauaaagaggacucaguauugauuucuguucaccaauauuccaggcaccuuuuuuagcuuuuccuuuuguaacuuuaaaauuaccacaggauucaacaauuuguuugaaugcuuuauaauccaaaccuuucacaguuuccacaaaagcacuuguggaagcagaaaaagaugccaaaauaauggcgaucucuucauuaaguuuaaagucaccaacaauauugauguugacuuucucuuuuuggaguauuucaagaagguugucauuaagaccuucggaaccuucuccaacaacaccuguaugguuacaaccuauguuagcgcuagcacguggaacccaauaggcacacuuguuauggcaaccaacauaagagaacacacagccuccaaaggcaauagugcgaccacccuuacgaagaaugguuuucaagccagauucauuaugguauucggcaagacuaugcucagguccuacuucugaauugugacaugcuggacaauaaauuuuaacaacagcauuuugggguaaguaaccacaaguaguggcaccuucuuuagucaaauucucagugccacaaaauucgcaaguggcuuuaacaaaaucgcccgucugccaugaaguuucaccacaaugaucacacuucaugagaguugaaaggcacauuugguugcauucauuuggugacgcaacuggauagacagaucgaauucuacccauaaagccaucaagcuuuuucuuuucaacccuugguugaauagucuugauuauggaauuuaagggaaauacaaaauuuggacauuccccauugaaggugucaaauuucuuugccaauuuaauuucaaaaggugucugcaauucauagcucuuuucagaacguuccguguaccaagcaauuucaugcucauguucacggcagcaguauacaccccucuuagugucaauaaaguccaguuguucggacaaagugcaugaagcuuuaccagcacgugcuagaaggucuuuaaugcacucaagaggguagccaucagggccacagaaguuguuaucgacauagcgaguguaugccccuccguuaagcucacgcaugaguucacggguaacaccacugcuauguuuaguguuccaguuuucuugaaaaucuucauaaggaucagugccaagcucgucgccuaagucaaaugacuuuagaucggcgccguaacuauggccaccagcuccuuuauuaccguucuuacgaagaagaaccuugcgguaagccacugguauuucgcccacaugagggacaaggacaccaagugucucaccacuacgaccguacugaaugccuucgaguucugcuaccagcucaaccauaacaugaccaugaggugcaguucgagcauccgaacguuugaugaacacauagggcuguucaaguugaggcaaaacgccuuuuucaacuucuacuaagccacaagugccaucuuuaagauguugacgugccucugauaagaccuccuccacggagucuccaaagccacguacgagcacgucgcgaaccuguaaaacaggcaaacugaguuggacguguguuuucucguugaaaccagggacaaggcucuccaucuuaccuuucggucacacccggacgaaaccuagaugugcugaugaucggcugcaacacggacgaaaccguaagcagccugcagaagauagacgaguuacucguguccugucaacgacaguaauuaguuauuaauuauacugcgugagugcacuaagcaugcagccgagugacagccacacagauuuuaaaguucguuuagagaacagaucuacaagagaucgaaaguugguugguuuguuaccugggaagguauaaaccuuuaau

SEQ ID NO: 11 - protein, 1356 aa, Human coronavirus NL63
MKLFLILLVLPLASCFFTCNSNANLSMLQLGVPDNSSTIVTGLLPTHWFCANQSTSVYSANGFFYIDVGNHRSAFALHTGYYDANQYYIYVTNEIGLNASVTLKICKFSRNTTFDFLSNASSSFDCIVNLLFTEQLGAPLGITISGETVRLHLYNVTRTFYVPAAYKLTKLSVKCYFNYSCVFSVVNATVTVNVTTHNGRVVNYTVCDDCNGYTDNIFSVQQDGRIPNGFPFNNWFLLTNGSTLVDGVSRLYQPLRLTCLWPVPGLKSSTGFVYFNATGSDVNCNGYQHNSVVDVMRYNLNFSANSLDNLKSGVIVFKTLQYDVLFYCSNSSSGVLDTTIPFGPSSQPYYCFINSTINTTHVSTFVGILPPTVREIVVARTGQFYINGFKYFDLGFIEAVNFNVTTASATDFWTVAFATFVDVLVNVSATNIQNLLYCDSPFEKLQCEHLQFGLQDGFYSANFLDDNVLPETYVALPIYYQHTDINFTATASFGGSCYVCKPHQVNISLNGNTSVCVRTSHFSIRYIYNRVKSGSPGDSSWHIYLKSGTCPFSFSKLNNFQKFKTICFSTVEVPGSCNFPLEATWHYTSYTIVGALYVTWSEGNSITGVPYPVSGIREFSNLVLNNCTKYNIYDYVGTGIIRSSNQSLAGGITYVSNSGNLLGFKNVSTGNIFIVTPCNQPDQVAVYQQSIIGAMTAVNESRYGLQNLLQLPNFYYVSNGGNNCTTAVMTYSNFGICADGSLIPVRPRNSSDNGISAIITANLSIPSNWTTSVQVEYLQITSTPIVVDCATYVCNGNPRCKNLLKQYTSACKTIEDALRLSAHLETNDVSSMLTFDSNAFSLANVTSFGDYNLSSVLPQRNIRSSRIAGRSALEDLLFSKVVTSGLGTVDVDYKSCTKGLSIADLACAQYYNGIMVLPGVADAERMAMYTGSLIGGMVLGGLTSAAAIPFSLALQARLNYVALQTDVLQENQKILAASFNKAINNIVASFSSVNDAITQTAEAIHTVTIALNKIQDVVNQQGSALNHLTSQLRHNFQAISNSIQAIYDRLDSIQADQQVDRLITGRLAALNAFVSQVLNKYTEVRGSRRLAQQKINECVKSQSNRYGFCGNGTHIFSIVNSAPDGLLFLHTVLLPTDYKNVKAWSGICVDGIYGYVLRQPNLVLYSDNGVFRVTSRVMFQPRLPVLSDFVQIYNCNVTFVNISRVELHTVIPDYVDVNKTLQEFAQNLPKYVKPNFDLTPFNLTYLNLSSELKQLEAKTASLFQTTVELQGLIDQINSTYVDLKLLNRFENYIKWPWWVWLIISVVFVVLLSLLVFCCLSTGCCGCCNCLTSSMRGCCDCGSTKLPYYEFEKVHVQ

SEQ ID NO: 12 - protein, 136 aa, Human coronavirus NL63
QHTDINFTATASFGGSCYVCKPHQVNISLNGNTSVCVRTSHFSIRYIYNRVKSGSPGDSSWHIYLKSGTCPFSFSKLNNFQKFKTICFSTVEVPGSCNFPLEATWHYTSYTIVGALYVTWSEGNSITGVPYPVSGI

SEQ ID NO: 13 - DNA, 27553 bp, Human coronavirus NL63
cttaaagaatttttctatctatagatagagaattttcttatttagactttgtgtctactcttctcaactaaacgaaatttttctagtgctgtcatttgttatggcagtcctagtgtaattgaaatttcgtcaagtttgtaaactggttaggcaagtgttgtattttctgtgtctaagcactggtgattctgttcactagtgcatacattgatatttaagtggtgttccgtcactgcttattgtggaagcaacgttctgtcgttgtggaaaccaataactgctaaccatgttttacaatcaagtgacacttgctgttgcaagtgattcggaaatttcaggttttggttttgccattccttctgtagccgttcgcacctatagcgaagccgctgcacaaggttttcaggcatgccgttttgttgcttttggcttacaggattgtgtaaccggtattaatgatgatgattatgtcattgcattgactggtactaatcagctctgtgccaaaattttacctttttctgatagaccccttaatttgcgaggttggctcattttttctaacagcaattatgttcttcaggactttgatgttgtttttggccatggtgcaggaagtgtggtttttgtggataagtacatgtgtggttttgatggtaaacctgtgttacctaaaaacatgtgggaatttagggattactttaataataatactgatagtattgttattggtggtgtcacttatcaactagcatgggatgttatacgtaaagacctttcttatgaacagcaaaatgttttagccattgagagcattcattaccttggtactacaggtcatactttgaagtctggttgcaaacttactaatgctaagccgcctaaatattcttctaaggttgttttgagtggtgaatggaatgctgtgtatagggcgtttggttcaccatttattacaaatggtatgtcattgctagatataattgttaaaccagttttctttaatgcttttgttaaatgcaattgtggttctgagagttggagtgttggtgcatgggatggttacttatcttcttgttgtggcacacctgctaagaaactttgtgttgttcctggtaatgtcgttcctggtgatgtgatcatcacctcaactagtgctggttgtggtgttaaatactatgctggcttagttgttaaacatattactaacattactggtgtgtctttatggcgtgttacagctgttcattctgatggaatgtttgtggcatcatcttcttatgatgcactcttgcatagaaattcattagaccctttttgctttgatgttaacactttactttctaatcaattacgtctagcttttcttggtgcttctgttacagaagatgttaaatttgctgctagcactggtgttattgacattagtgctggtatgtttggtctttacgatgacatattgacaaacaataaaccttggtttgtacgcaaagcttctgggctttttgatgcaatctgggatgcttttgttgccgctattaagcttgtaccaactactactggtgttttggttaggtttgttaagtctattgcttcaactgttttaactgtctctaatggtgttattattatgtgtgcagatgttccagatgcttttcaatcagtttatcgcacatttacacaagctatttgtgctgcatttgatttttctttagatgtatttaaaattggtgatgttaaatttaaacgacttggtgattatgttcttactgaaaacgctcttgttcgtttgactactgaagttgttcgtggtgttcgtgatgctcgcataaagaaagccatgtttactaaagtagttgtaggtcctacaactgaagttaagttttctgttattgaacttgccactgttaatttgcgtcttgttgattgtgcacctgtagtttgccctaaaggtaagattgttgttattgctggacaagcttttttctatagtggtggtttttatcgttttatggttgatcctacaactgtattaaatgatcctgtttttactggtgatttattctacactattaagtttagtggttttaagcttgatggttttaaccatcagtttgttactgctagttctgctacagatgccattattgctgttgagctgttgttattggattttaaaactgcagtttttgtgtacacatgtgtggttgatggctgtagtgtcattgttagacgtgatgctacattcgctacacatgtgtgttttaaggactgttataatgtttgggagcaattctgcattgataattgtggtgagccatggtttttgactgattataatgctatcttgcagagtaataaccctcaatgtgctattgttcaagcatcagagtctaaagttttgcttgagaggtttttacctaagtgtcctgaaatactgttgagtattgatgatggccatttatggaatctttttgttgaaaagtttaattttgttacagattggttaaaaactcttaagcttacacttacttctaatggtcttttaggtaattgtgccaaacgttttagacgtgttttggtaaaattgcttgatgtctataatggttttcttgaaactgtctgtagtgtcgcatacactgctggtgtttgcatcaaatattatgctgttaatgttccatatgtagttattagtggttttgtaagtcgtgtaattcgtagagaaaggtgtgacatgacttttccttgtgttagttgtgtcacctttttctatgaatttttagacacttgttttggtgttagtaaacctaatgccattgatgttgaacatttagagcttaaagaaactgtttttgttgaacctaaggatggtggtcaattttttgtttctggtgattatctttggtatgttgtagatgacatttattatccagcttcatgtaatggtgtattgcctgttgcttttacaaaattagctggtggtaaaatatctttttctgatgatgttatagttcatgatgttgaacctacccataaagtcaagctcatatttgagtttgaagatgatgttgttaccagtctttgtaagaagagttttggtaagtccattatttatacaggtgattgggaaggtctacatgaagttcttacatctgcaatgaatgtcattgggcaacatattaagttgccacaattttatatttatgatgaagagggtggttatgatgtttctaaaccagttatgatttcacaatggcctattagtaatgatagtaatggttgtgttgttgaagcgagcactgattttcatcaattagaatgtattgttgatgactctgttagagaagaggttgatataattgaacaaccttttgaagaagttgaacatgtgctctcaattaagcaacctttttctttttcttttagagatgaattgggtgttcgtgttttagatcaatctgataataattgttggattagtaccacacttgtacagttgcaacttacaaagcttttggatgattctattgagatgcaattgtttaaagttggtaaagttgattcaattgtccaaaagtgttatgagttgtctcatttaattagtggttcacttggtgatagtggtaaacttcttagtgaacttcttaaagaaaaatatacatgttctataacttttgagatgtcttgtgattgtggtaaaaagtttgatgatcaggttggttgtttgttttggattatgccttacacaaaactttttcaaaaaggtgagtgttgtatttgtcataaaatgcagacttataagcttgttagtatgaaaggtactggtgtgtttgtacaggatccagcacctattgacattgatgctttccctgtgaaacctatatgttcatctgtatatttaggtgttaagggttctggtcattatcaaacaaatttatacagttttaacaaagctattgatggttttggtgtctttgacattaaaaatagtagtgttaatactgtttgttttgttgatgttgattttcatagtgtagaaatagaagctggtgaagttaaaccttttgctgtatataaaaatgttaaattttatttaggtgatatttcacaccttgtaaactgtgtttcttttgactttgttgtcaatgctgctaatgaaaatctcttgcatggaggcggtgttgcacgtgctattgatattttgactgaaggtcaacttcagtcattatctaaagattacattagtagtaatggtccacttaaggttggagcaggtgttatgttggagtgtgaaaaattcaacgtatttaatgttgttggtccgcgaactggtaaacatgagcattcattacttgttgaagcttataattctattttatttgaaaatggtattccacttatgcctcttcttagttgtggtatttttggtgtaaggattgaaaattctcttaaagctttgtttagttgtgacattaataaaccattgcaagtttttgtttattcttcaaatgaagaacaagctgttcttaagtttttagatggtttagatttaacaccagtcattgatgatgttgatgttgttaaaccttttagagttgaaggtaatttttcattctttgattgtggtgtcaatgccttggatggtgatatttacttattatttactaactctattttaatgttggataaacaaggacaattattggacacaaaacttaatggtattttgcaacaggcagctcttgattatcttgctacagttaaaactgtaccagctggtaatttggttaaactttttgttgagagttgtaccatttatatgtgtgttgtaccatcgataaatgatctttcttttgataaaaatcttggtcgttgtgtgcgtaaacttaatagattgaaaacttgtgttattgccaatgttcctgctattgatgttttgaaaaagcttctttcaagtttgactttaactgttaaatttgttgtagagagtaatgttatggatgttaacgactgttttaagaatgataatgtagttttgaaaattactgaagatggtattaatgttaaagatgttgttgttgagtcttctaagtcacttggtaaacaattgggtgttgtgagtgatggtgttgactcttttgaaggtgttttacctattaatactgatactgtcttatctgtagctccagaagttgactgggttgctttttacggttttgaaaaggcagcactttttgcttctttggatgtaaagccatatggttaccctaatgattttgttggtggttttagagttcttgggaccaccgacaataattgttgggttaatgcaacttgtataattttacagtatcttaagcctacttttaaatctaagggtttaaatgttctttggaacaaatttgttacaggtgatgttggaccttttgttagttttatttattttataactatgtcttcaaagggtcaaaagggtgatgctgaagaggcattatctaaattgtcagagtatttgattagtgattctattgttactcttgaacaatattcaacttgtgacatttgtaaaagtactgtagttgaagttaaaagtgctattgtctgtgctagtgtgcttaaagatggttgtgatgttggtttttgtccacacagacataaattgcgttcacgtgttaagtttgttaatggacgtgttgttattaccaatgttggtgaacctataatttcacaaccttctaagttgcttaatggtattgcttatacaacattttcaggttcttttgataacggtcactatgtagtttatgatgctgctaataatgctgtctatgatggtgctcgtttattttcttcagatttgtctactttagctgttacagctattgttgtagtaggtggttgtgtaacatctaatgttccaacaattgttagtgagaaaatttctgttatggataaacttgatactggtgcacaaaaatttttccaatttggtgattttgttatgaataacattgttctgtttttaacttggttgcttagtatgtttagtcttttacgtacttctattatgaagcatgatattaaagttattgccaaggctcctaaacgtacaggtgttattttgacacgtagttttaagtataacattagatctgctttgtttgttataaagcagaagtggtgtgttattgttactttgtttaagttcttattattattatatgctatttatgcacttgtttttatgattgtgcaatttagtccttttaatagtcttttatgtggtgacattgtaagtggttatgaaaaatccacttttaataaggatatttattgtggtaattctatggtttgtaagatgtgtttgttcagttatcaagagtttaatgatttggatcatactagtcttgtttggaagcacattcgtgatcctatattaatcagtttacaaccatttgttatacttgttattttgttaatttttggtaatatgtatttgcgttttggacttttatattttgttgcacaatttattagtacttttggttctttcttaggctttcatcagaaacagtggtttttacattttgtgccgtttgatgttttatgtaatgagtttttagctacatttattgtctgcaaaatcgttttatttgttagacatattattgttggctgtaataatgctgactgtgtagcttgttctaaaagtgctagacttaaacgtgtaccacttcaaactattattaatggtatgcataaatcattctatgttaatgctaatggtggtacttgtttctgtaataaacataacttcttttgtgttaattgtgattcttttgggcctggtaatacttttattaatggtgatattgcaagagagcttggtaatgttgttaaaacagctgttcaacccacagctcctgcatatgttattattgataaggtagattttgttaatggattttatcgtctttatagtggtgacactttttggcggtatgactttgacattactgaatctaagtatagttgtaaagaggttctgaagaattgtaatgttttagaaaattttattgtttacaataatagtggtagtaacattacacagattaaaaatgcttgtgtttatttttctcaattgttgtgtgaacctataaagttggtaaattcagagttgttgtcaactttatctgttgattttaatggtgttttgcataaggcatatgttgatgttttgtgtaatagtttttttaaggagttaactgctaacatgtccatggctgaatgtaaagctacacttggtttgactgtttctgatgatgattttgtttcagctgttgccaatgcacataggtatgacgttttgctttcagatttgtcatttaataatttttttatttcttatgctaaacctgaagataagttgtccgtttatgacattgcttgttgtatgcgtgccggttctaaggttgttaaccataatgttttaattaaagagtcaatacctattgtttggggtgtcaaggactttaatactctttctcaagaaggtaagaagtaccttgttaaaacaactaaagcaaagggtttgacttttttattaacttttaatgataaccaagcaattacacaagttcctgctactagtatagttgcaaaacagggtgctggttttaaacgtacttataattttctgtggtatgtatgtttatttgttgttgcattgtttattggtgtctcatttattgattatacaaccactgtaactagctttcatggttatgattttaagtacattgagaatggtcagttgaaggtgtttgaagcacctttacactgtgttcgtaatgtttttgataattttaatcaatggcatgaggctaagtttggtgttgttactactaatagtgataaatgtcctatagttgttggtgtttcagagcgtattaatgttgttcctggtgttccaacaaatgtatatttggtaggaaagactcttgtttttacattacaggctgcttttggaaacacaggtgtttgttatgactttgatggtgttaccactagtgataagtgtatttttaattctgcttgtactaggttggaaggtttgggtggtgacaatgtttattgttacaacactgatcttattgaaggttctaaaccttatagtactttacagcccaatgcgtattataagtatgatgctaaaaattatgtacgttttccagaaattttagctagaggttttggcttacgtactattagaactttggctacacgttattgtagagttggtgaatgccgtgactcacataaaggtgtttgttttggttttgataaatggtatgttaatgatggacgtgttgatgacggttacatttgtggtgatggtcttatagaccttcttgttaatgtactctcaatctttagttcatcttttagcgttgtggctatgtctggacatatgttgtttaattttctttttgcagcatttattacatttttgtgctttttagttactaaatttaaacgtgtttttggtgatctttcttatggtgtttttactgttgtttgtgcaactttgattaataacatttcttatgttgttactcaaaatttattttttatgttgctttatgctattttgtattttgtttttactaggacagtgcgttatgcttggatttggcatattgcatacattgttgcatacttcttgttaataccatggtggcttctcacatggtttagttttgctgcatttttagagcttttacctaatgtttttaagttaaaaatctctactcaattgtttgaaggtgataagtttataggtacttttgagagtgctgctgcaggtacatttgttcttgacatgcgttcttatgaaaggctgataaatactatttcacctgagaaacttaagaattatgctgcaagttataataaatataaatattatagtggtagtgctagtgaggctgattatcgttgtgcttgttatgctcatttagccaaggctatgttagattatgcaaaagatcataatgacatgttatattctccacctactattagctacaattccaccttacaatctggtcttaagaagatggcacaaccatctggttgtgttgagagatgtgtggttcgcgtctgttatggtagtactgtgcttaatggagtttggttaggtgacactgttacttgtcctagacatgtcatagcaccatcaaccactgttcttattgattatgatcatgcatatagtactatgcgtttgcataatttttcagtgtctcataatggtgtcttcttgggagttgtcggtgttacaatgcatggttctgtgttgcgtattaaggtttcacaatctaatgtacatacacctaaacatgtttttaaaacgttgaaacctggtgattcttttaatattttagcatgttatgaaggtattgcatctggtgtttttggtgttaatttacgtacaaactttactattaaaggttcttttataaatggagcttgtggttctcctggttataatgttagaaatgatggtactgttgagttttgttatttacaccaaattgagttaggtagtggtgctcatgttggttctgattttactggtagtgtttatggtaattttgatgaccaacctagtttgcaagttgagagtgccaaccttatgctatcagataatgttgttgcctttttgtatgctgctttgttgaatggttgtaggtggtggttgtgttcaactagagttaatgttgatggttttaatgaatgggctatggctaatggttatacaagtgtttctagtgttgagtgctattctattttggcagcaaaaactggtgttagtgttgaacaattgttagcttccattcaacatcttcatgaaggttttggtggtaaaaacatacttggttattctagtttatgtgatgagttcacactagctgaagttgtgaagcagatgtatggtgttaacttgcaaagtggtaaggttatttttggtttaaaaacaatgtttttatttagcgttttcttcacaatgttttgggcagaactctttatttatacaaacactatatggataaaccctgtgatacttacacctatattttgtctacttttgtttttgtcattagttttaactatgtttcttaaacataagtttttgtttttgcaagtatttttattacctactgttattgcaactgctttatataattgtgttttggattattacatagtaaaatttttggctgaccattttaactataatgtttcagtattacaaatggatgttcagggtttagttaatgttttggtctgtttatttgttgtatttttacacacatggcgcttttctaaagaacgttttacacattggtttacatatgtgtgttctcttatagcagttgcttacacttatttttatagtggtgactttttgagtttgcttgttatgtttttatgtgctatatctagtgattggtacattggtgccattgtttttaggttgtcacgtttgattgtatttttttcacctgaaagtgtatttagtgtttttggtgatgtgaaacttactttagttgtttatttaatttgtggttatttagtttgtacttattggggcattttgtattggttcaataggttttttaaatgtactatgggtgtttatgattttaaggtgagtgctgctgaatttaaatacatggttgctaatggacttcatgcaccacatggaccttttgatgcactttggttatcattcaaactacttggtattggtggtgaccgttgtataaaaatttcaactgtccaatccaaactgactgatttgaagtgtactaatgttgtgttattgggttgtttgtctagtatgaacattgcagctaattctagtgaatgggcttattgtgttgatttacacaataagattaatctttgtgatgaccctgaaaaagctcaaagtatgttgttagcactccttgcgttctttctaagtaaacatagtgattttggtcttgatggccttattgattcttattttgataatagtagcacccttcagagtgttgcttcatcatttgttagtatgccatcatatattgcttatgaaaatgctagacaagcttatgaggatgctattgctaatggatcttcttctcaacttattaaacaattgaagcgtgccatgaatatcgcaaagtctgaatttgatcatgagatatctgttcagaagaaaattaatagaatggctgaacaagctgctactcagatgtataaagaagcacgctctgttaatagaaaatctaaagttattagtgctatgcactctttactttttggaatgttaagacgtttggatatgtctagtgttgaaactgttttgaatttagcacgtgatggtgttgtgccattgtcagttatacctgcaacttcagcttctaaactaactattgttagtccagatcttgaatcttattctaagattgtttgtgatggttctgttcattatgctggagttgtttggacacttaatgatgttaaagacaatgatggtagacctgttcatgttaaagagattacaaaggaaaatgttgaaactttgacatggcctcttatccttaattgtgaacgtgttgttaaacttcaaaataatgaaattatgcctggtaaacttaagcaaaaacctatgaaagctgagggtgatggtggtgttttaggtgatggtaatgccttgtataatactgagggtggtaaaacttttatgtacgcttatatttctaataaagctgaccttaaatttgttaagtgggagtatgagggtggttgcaacacaatcgagttagactctccttgtcgatttatggtcgaaacacctaatggtcctcaagtgaagtatttgtattttgttaaaaatttaaataccttacgtagaggtgccgttcttggttttataggtgccacaattcgtctacaagctggtaaacaaactgaattggctgttaattctggacttttaactgcttgtgctttttctgttgatccagcaactacttacttggaagctgttaaacatggtgcaaaacctgtaagtaattgtattaagatgttatctaatggtgctggtaatggtcaagctataacaactagtgtagatgctaacaccaatcaagattcttatggtggagcgtctatttgtttgtattgtcgggcccacgttcctcaccctagtatggatggttactgtaagtttaagggtaaatgtgttcaggttcctattggttgtttggatcctattaggttttgtttagaaaataatgtgtgtaatgtttgtggttgttggttgggacacgggtgtgcttgtgaccgtacaactattcaaagtgttgacatttcttatttaaacgagcaaggggttctagtgcagctcgactagaaccctgcaatggcacggacatcgataagtgtgttcgtgcttttgacatttataataaaaatgtttcattcttgggtaagtgtttgaagatgaactgtgttcgttttaaaaatgctgatcttaaggatggttattttgttataaagaggtgtactaagtcggttatggaacacgagcaatccatgtataacctacttaacttttctggtgctttggctgagcatgatttctttacttggaaagatggcagagtcatttatggtaatgttagtagacataatcttactaaatatactatgatggacttggtctatgctatgcgtaactttgatgaacaaaattgtgatgttctaaaagaagtattagttttaactggttgttgtgacaattcttattttgatagtaagggttggtatgacccagttgaaaatgaagatatacatagagtttatgcatctcttggcaaaattgtagctagagctatgcttaaatgcgttgctctatgcgatgcgatggttgctaaaggtgttgttggtgttttaacattagataaccaagatcttaatggtaacttttatgattttggtgattttgttgttagcttacctaatatgggtgttccctgttgtacatcatattattcttatatgatgcctattatgggtttaactaattgtttagctagtgagtgttttgtcaagagtgatatttttggtagtgattttaaaacttttgatttgcttaagtatgatttcactgaacataaagaaaatttattcaataagtactttaagcattggagttttgattatcatcctaattgtagtgactgttatgatgatatgtgtgttatacattgtgctaattttaatacactatttgccacaactataccaggtactgcttttggtccactatgtcgtaaagtttttatagatggtgttccacttgttacaactgctggttatcattttaagcaattaggtttggtttggaataaagatgttaacacacactcagttaggttgacaattactgaacttttgcaatttgtcaccgacccttccttgataatagcttcttccccagcactcgttgatcaacgcactatttgtttttctgttgcagcattgagtactggtttgacaaatcaagttgttaagccaggtcattttaatgaagagttttataactttcttcgtttaagaggtttctttgatgaaggttctgaacttacattaaaacatttcttcttcgcacagaatggtgatgctgctgttaaagattttgacttttaccgttataataagcctaccattttagatatttgtcaagctagagttacatataagatagtctctcgttattttgacatttatgaaggtggctgtattaaggcatgtgaagttgttgtaacaaatcttaataagagtgctggttggccattaaataagtttggtaaagctagtttgtattatgaatctatatcttatgaagaacaggatgctttgtttgctttgacaaagcgtaatgtcctccctactatgacacagctgaatcttaagtatgctattagtggtaaagaacgtgctagaactgttggtggtgtttctctgttgtctacaatgaccacaagacaataccatcaaaaacatcttaaatccattgttaatacacgcaatgccactgttgttattggtactaccaaattttatggtggttggaataatatgttgcgtactttaattgatggtgttgaaaaccctatgcttatgggttgggattatcccaaatgtgatagagctttgcctaacatgatacgtatgatttcagccatggtgttgggctctaagcatgttaattgttgtactgcaacagataggttttataggcttggtaatgagttggcacaagttttaacagaagttgtttattctaatggtggtttttattttaagccaggtggtacgacttctggtgacgctagtacagcttatgctaattctatttttaacatttttcaagccgtgagttctaacattaacaggttgcttagtgtcccatcagattcatgtaataatgttaatgttagggatctacaacgacgtctgtatgataattgttataggttaactagtgttgaagagtcattcattgatgattattatggttatcttaggaaacatttttcaatgatgattctctctgatgacggtgttgtctgttataacaaggattatgctgagttaggttatatagcagacattagtgcttttaaagccactttgtattaccagaataatgtctttatgagtacttctaaatgttgggttgaagaagatttaactaagggaccacatgagttttgttcccagcatactatgcaaatagttgacaaagatggtacctattatttgccttacccagatcctagtaggatcttgtcagctggtgtttttgttgatgatgttgttaagacagatgctgttgttttgttagaacgttatgtgtctttagctattgatgcataccctctttcaaaacaccctaattccgaatatcgtaaggttttttacgtattacttgattgggttaagcatcttaacaaaaatttgaatgagggtgttcttgaatctttttctgttacacttcttgataatcaagaagataagttttggtgtgaagatttttatgctagtatgtatgaaaattctacaatattgcaagctgctggtttatgtgttgtttgtggttcacaaactgtacttcgttgtggtgattgtctgcgtaagcctatgttgtgcactaaatgcgcatatgatcatgtatttggtaccgaccacaagtttattttggctataacaccgtatgtatgtaatgcatcaggttgtggtgttagtgatgtcaaaaaattgtatcttggtggtttgaattactattgtacaaatcataaaccacagttgtcttttccattatgttcagctggtaatatatttggtttatataaaaattcagcaactggttccttagatgttgaagtttttaataggcttgcaacgtctgattggactgatgttagggactataaacttgctaatgatgttaaagatacacttagactctttgcggctgaaactattaaagctaaagaagagagtgttaagtcttcttatgcttttgcaactcttaaagaggttgttggacctaaagaattgcttcttagttgggaaagtggtaaagttaaaccacctttgaatcgtaattctgttttcacttgttttcaaataagtaaggactcaaaattccaaataggtgagttcatctttgagaaggttgaatatggttctgatactgttacgtataagtctactgtaactactaagttagttcctggtatgatttttgtcttaacatctcacaatgtccaacctttacgtgcaccaactattgcaaaccaagagaagtattctagcatttataaattgcaccctgcttttaatgtcagtgatgcatatgctaatttggttccatattaccaacttattggtaaacaaaagataactacaatacagggtcctcctggtagtggtaagtcacattgttccattggacttggattgtactacccaggtgcgcgtattgtttttgttgcttgtgcccatgctgctgttgattccttatgtgcaaaagctatgactgtttatagcattgataagtgtactaggattatacctgcaagagctcgggttgagtgttatagtggctttaaaccaaataacactagtgcacaatacatatttagcactgttaacgcattacctgagtgtaatgctgatatcgttgttgtagatgaagtttcaatgtgtacaaattatgacctttctgttattaaccagcgtttatcatataaacatattgtttatgttggtgatccacaacaacttcctgcacctagagtaatgattactaaaggtgttatggagcctgttgattataacgttgttactcaacgtatgtgtgctataggccctgatgtttttcttcataaatgttatagatgtcctgctgaaatagttaatacagtttctgaacttgtttatgagaacaagtttgtccctgttaaacctgctagtaaacagtgttttaaagtcttttttaagggtaatgtacaggttgacaatggttctagtattaacagaaagcagcttgaaatagttaagctgtttttagttaaaaatccaagttggagtaaggctgtgtttatttctccttataatagtcagaattatgttgctagtagatttttaggacttcaaattcaaactgttgattcttctcaaggtagtgagtatgattatgtaatctatgcacaaacttctgacactgcacatgcttgcaatgtaaaccgttttaatgttgctataacacgtgctaagaagggtatattttgtgtaatgtgtgataaaactttgtttgattcacttaagttttttgagattaaacatgcagatttacactctagccaggtttgtggcttgtttaaaaattgtacacgcactcctcttaatttaccaccaactcatgcacacactttcttgtcgttgtcagatcagtttaagactacaggtgatttagctgttcaaataggttcaaataacgtttgtacttatgaacatgttatatcatttatgggttttaggtttgatattagtattcctggtagtcatagtttgttttgtacacgtgactttgctattcgtaatgtgcgtggttggttgggtatggatgttgaaagtgctcatgtttgtggcgataacataggtactaatgttcctttacaggttggtttttcaaatggtgttaattttgttgtgcaaactgaaggttgtgtgtctaccaattttggtgatgttattaaacctgtttgtgcaaaatctccaccaggtgaacaatttagacaccttattcctcttttacgtaaaggacaaccttggttaattgttcgtagacgcattgtgcaaatgatatctgattatttgtccaatttgtctgacattcttgtctttgttttgtgggcaggtagtttggaattaactacaatgcgttactttgtaaaaatagggccaattaaatattgttattgtggtaattctgccacttgttataattcagttagtaatgaatattgttgttttaaacatgcattgggttgtgattatgtttacaatccgtatgcttttgatatacaacagtggggttatgttggttccttgagccaaaaccaccacacattctgtaacattcatagaaacgagcatgatgcctctggtgatgctgttatgacacgttgtttggcagtacatgattgttttgtcaaaaatgttgattggactgtaacgtacccctttattgcaaatgagaaatttatcaatggctgtgggcgtaatgtccagggacatgttgttcgtgcagccttgaaattgtataaacctagtgttattcatgacattggtaatcctaaaggtgtacgttgtgctgttactgatgccaaatggtactgttatgacaagcaacctgttaatagtaatgtcaagttgttggattatgattatgcaacccatggtcaacttgatggtctttgtttattctggaattgtaatgttgatatgtatccagaattttcaattgtgtgtcgttttgacacacgtactcgttctgtttttaatttagaaggtgttaatggtggttctctttatgttaacaaacatgcgtttcatacaccagcatatgataaacgtgcttttgttaaattaaaacctatgccctttttttactttgatgacagtgattgtgatgttgtgcaagaacaagttaattatgtaccccttcgcgctagtagttgtgttactcgttgtaatataggtggtgctgtttgttcaaaacatgcaaatttgtatcaaaaatatgttgaggcatataatacatttacacaggcaggttttaacatttgggtaccacatagttttgatgtttataatttgtggcaaatttttattgaaactaatttacaaagtcttgaaaatatagcatttaatgttgtaaaaaaagggtgttttactggtgttgatggtgagttacctgttgcagttgttaacgacaaagtttttgttcgctatggcgatgttgacaacttggtttttacaaataaaacaacattgcctactaatgttgcttttgaattgtttgcaaaacgaaaaatgggtttaacaccaccattgtctattctcaaaaatctcggtgttgttgctacatataaatttgttttatgggattatgaagctgaaagaccttttacctcatatactaagagtgtatgtaaatacactgattttaatgaggatgtttgtgtttgttttgacaatagtattcagggttcgtatgagcgttttacgcttactacgaacgctgttttattttctactgttgtcattaaaaatttaacacctataaagttgaattttggtatgttgaatggtatgccagtttcttctattaagggtgataaaggtgttgaaaaattagttaattggtacatatatgttcgtaaaaatggtcaatttcaagatcactatgatggtttttacactcaaggtaggaatttatcagactttacaccaagaagtgatatggagtatgattttcttaacatggatatgggtgtttttattaataaatatggtcttgaggattttaattttgaacatgttgtatatggtgatgtttcaaaaactacattaggaggtcttcatttgttgatatcacagtttaggcttagtaaaatgggtgttttgaaagctgatgattttgtcactgcttctgacacaactttgaggtgctgtactgttacttatcttaatgaacttagttcaaaagttgtttgtacttatatggatttgttgttggacgactttgttactatactaaagagtttagatcttggtgtaatatctaaagttcatgaagttattatagataataaaccttataggtggatgttgtggtgtaaagataaccacttgtccactttttatccacagttgcagtctgctgaatggaagtgtggttatgctatgccacaaatttataagcttcaacgtatgtgtttggaaccttgtaatttatataattatggtgctggtattaagttgcctagtggtataatgttaaatgttgttaaatacactcagctttgtcaatacctaaatagcactacaatgtgcgtacctcataatatgcgtgttttgcactatggtgctggttctgacaaaggtgtggcacctggtacaactgttttaaaacgttggctaccacccgatgcaataatcattgataatgatatcaatgattatgttagtgatgcagattttagcattacaggtgattgtgctactgtttatcttgaagataagtttgacttacttatttctgatatgtatgatggtagaattaaattttgtgatggtgaaaatgtctctaaagatgggttttttacttatcttaatggtgttattagagaaaaattagctattggtggtagtgttgccattaagattacagaatatagttggaataagtatctttatgaattaatacaaagatttgctttttggactttgttttgcacgtctgttaatacatcctcttcagaagcttttcttattggtattaattatttaggtgactttattcaaggtccttttatagctggtaacactgttcatgctaattatatattttggcgtaattctactattatgtctttgtcatacaattcagttttagatttaagtaagtttgaatgtaaacataaagccactgttgttgttacacttaaagatagtgatgtaaatgatatggttttgagtttgattaagagtggtaggttgttgttacgcaataatggtcgttttggtggttttagtaatcatttagtctcaactaaatgaaacttttcttgattttgcttgttttgcccctggcctcttgctttttcacatgtaatagtaatgctaatctctctatgttacaattaggtgttcctgacaattcttcaactattgttacgggtttattgccaactcattggttttgtgctaatcagagtacatctgtttactcagccaatggtttcttttatattgatgttggtaatcaccgtagtgcttttgcgctccatactggttattatgatgctaatcagtattatatttatgttactaatgaaataggcttaaatgcttctgttactcttaagatttgtaagtttagtagaaacactacttttgattttttaagtaatgcttctagttcttttgactgtatagttaatttgttatttacagaacagttaggtgcgcctttgggcataactatatctggtgaaactgtgcgtctgcatttatataatgtaactcgtactttttatgtgccagcagcttataaacttactaaacttagtgttaaatgttactttaactattcctgtgtttttagtgttgtcaacgccaccgttactgtgaatgtcaccacacataatggccgtgtagttaactacactgtttgtgatgattgtaatggttatactgataacatattttctgttcaacaggatggccgcattcctaatggtttcccttttaataattggtttttgttaactaatggttccacactagtggacggggtctctagactttatcaaccactccgtttaacttgtttatggcctgtacctggtcttaaatcttcaactggttttgtttattttaatgccactggttctgatgttaattgtaacggctatcaacataattctgttgttgatgttatgcgttacaatcttaacttcagtgctaattctttggacaatctcaagagtggtgttatagtttttaaaactttacagtacgatgttttgttttattgtagtaattcttcctcaggtgttcttgacaccacaataccttttggcccgtcctctcaaccttattactgttttataaacagcactatcaacactactcatgttagcacttttgtgggtattttaccacccactgtgcgtgaaattgttgttgctagaactggccagttttatattaatggttttaagtatttcgatttgggtttcatagaagctgtcaattttaatgtcacgactgctagcgccacagatttttggacggttgcatttgctacttttgttgatgttttggttaatgttagtgcaactaacattcaaaacttactttattgcgattctccatttgaaaagttgcagtgtgagcacttgcagtttggattgcaggatggtttttattctgcaaattttcttgatgataatgttttgcctgagacttatgttgcactccccatttattatcaacacacggacataaattttactgcaactgcatcttttggtggttcttgttatgtttgtaaaccacaccaggttaatatatctcttaatggtaacacttcagtgtgtgttagaacatctcatttttcaattaggtatatttataaccgcgttaagagtggttcaccaggtgactcttcatggcacatttatttaaagagtggcacttgtccattttctttttctaagttaaataattttcaaaagttcaagactatttgtttctcaaccgtcgaagtgcctggtagttgtaattttccgcttgaagccacctggcattacacttcttatactattgttggtgctttgtatgttacttggtctgaaggtaattctattactggtgtaccttatcctgtctctggtattcgtgagtttagtaatttagttttaaataattgtaccaaatataatatttatgattatgttggtactggaattatacgttcttcaaaccagtcacttgctggtggtattacatatgtttctaactctggtaatttacttggttttaaaaatgtttccactggtaacatttttattgtgacaccatgtaaccaaccagaccaagtagctgtttatcaacaaagcattattggtgccatgaccgctgttaatgagtctagatatggcttgcaaaacttactacagttacctaacttttattatgttagtaatggtggtaacaattgcactacggccgttatgacttattctaattttggtatttgtgctgatggttctttgattcctgttcgtccgcgtaattctagtgataatggtatttcagccataatcactgctaatttatccattccttctaactggactacttcagttcaagttgagtacctccaaattactagtactccaatagttgttgattgtgctacttatgtgtgtaatggtaaccctcgctgtaagaatctacttaagcagtatacttctgcttgtaaaactattgaagatgccttacgacttagtgctcatttggaaactaatgatgttagtagtatgctaactttcgatagcaatgcttttagtttggctaatgttactagttttggagattataacctttctagtgttttacctcagagaaacattcgttcaagccgtatagcaggacgtagtgctttggaagatttgttgtttagcaaagttgttacatctggtttgggtactgttgatgttgactataagtcttgtactaaaggtctttctattgctgaccttgcttgtgctcagtactacaatggcataatggttttgccaggtgttgctgatgctgaacgtatggccatgtacacaggttctcttataggtggcatggtgctcggaggtcttacatcagcagccgccatacctttttctttggcactgcaagcacgacttaactatgttgctttacaaactgatgtgcttcaagaaaatcagaaaattttggctgcatcatttaataaggctattaataatattgttgcttcttttagtagcgttaatgatgctattacacaaactgcagaggctatacatactgttactattgcacttaataagattcaggatgttgttaatcaacagggtagtgctcttaaccatctcacttcacaattgagacataattttcaggccatttctaattcaattcaggctatttatgaccggcttgattcaattcaagccgatcaacaagttgacagattaattactggacggcttgcagctttgaatgcatttgtttcccaagttttgaataaatatactgaagttcgtggttcaagacgcttagcacagcagaagattaatgaatgtgtcaagtcacaatctaatagatatggtttttgtggcaatggcactcacatcttttcaatcgtcaactcagctccagatggtttgctttttcttcatactgttttgctgccaactgattacaagaatgtaaaggcgtggtctggtatctgtgttgatggcatttatggctatgttctgcgtcaacctaacttggttctttattctgataatggtgtctttcgtgtaacttccagggtcatgtttcaacctcgcttacctgttttgtctgattttgtgcaaatatataattgtaatgttacttttgttaacatatctcgtgttgagttacatactgtcatacctgactacgttgatgttaataaaacattacaagagtttgcacaaaacttaccaaagtatgttaagcctaattttgacttgactccttttaatttaacatatcttaatttgagttctgagttgaagcaactcgaagctaaaactgctagtctttttcaaactactgttgaattacaaggtcttattgatcagattaacagtacatatgttgatttgaagttgcttaataggtttgaaaattatatcaaatggccttggtgggtttggctcattatttctgttgtttttgttgtattgttgagtcttcttgtgttttgttgtctttctacaggttgttgtggttgttgcaattgtttaacttcatcaatgcgaggctgttgtgattgtggttcaactaaacttccttattacgaatttgaaaaggtccacgttcaataatgccttttggtggcctatttcaacttactcttgaaagtactattaataagagtgtggctaatctcaaattaccacctcatgatgttactgtcttgcgtgacaatcttaaacctgttactacacttagtactattactgcttatttgttagttagtttgtttgtcacttactttgctttattcaaacctcttactgctagaggtcgtgttgcttgttttgttttaaaactattgacactatttgtctatgtgcctttattggttctttttggtatgtatcttgacagttttataattttttctacgctgttgtttcgattcatacatgttggctattatgcctatctctataaaaatttttcatttgttttgttcaatgttactaaactatgcttcgtttcaggcaagtgttggtatcttgaacaatcattttatgaaaatcgttttgctgctatttatggtggtgaccactatgtcgttttaggtggtgaaactattacttttgtttcttttgatgacctttatgttgctattagaggttcttgtgaaaagaacctacaacttatgcgtaaggttgacttgtataatggtgctgtcatttacatttttgccgaagagcctgttgttggtatagtctactcttctcaactatacgaagatgttccttcgattaattgatgacaatggtattgtcctcaattccattttatggctccttgttatgatatttttctttgtgttggcaatgacctttattaaactgattcaattgtgttttacttgtcattatttttttagtaggacattatatcaaccagtttataaaatttttcttgcttaccaagattatatgcaaatagcacctgttccagctgaagtactaaatgtctaaactaaacgatgtctaatagtagtgtgcctcttttagaggtttatgtccatttacgtaactggaactttagttggaatttaattctaacgctttttatagttgtgttgcagtatgggcattataagtatagcagacttctttatggtttaaagatgtctgttttatggtgtttatggccacttgttctagctttgtctatttttgactgttttgtcaattttaatgtggactgggtcttttttggttttagtattcttatgtctattattacactttgtttatgggttatgtattttgttaatagtttcagactttggcgccgtgttaaaactttttgggcttttaatcctgaaactaatgcaatcatctctctccaggtttacggacataattattacttaccggtgatggctgcacctacaggtgttacattaacacttcttagtggtgtacttcttgttgatggccataagattgctactcgtgttcaagtgggtcagttgcctaaatatgtaatagttgctacgcctagtaccacaattgtttgtgaccgtgttggtcgctctgttaatgaaacaagccagactggttgggcattctacgtccgtgctaaacatggtgatttttctggtgttgcctctcaggagggtgttttgtcagaaagagagaagttgcttcatttaatctaaactaaacaaaatggctagtgtaaattgggccgatgacagagctgctaggaagaaatttcctcctccttcattttacatgcctcttttggttagttctgataaggcaccatatagggtcattcccaggaatcttgtccctattggtaagggtaataaagatgagcagattggttattggaatgttcaagagcgttggcgtatgcgcagggggcaacgtgttgatttgcctcctaaagttcatttttattacctaggtactggacctcataaggaccttaaattcagacaacgttctgatggtgttgtttgggttgctaaggaaggtgctaaaactgttaataccagtcttggtaatcgcaaacgtaatcagaaacctttggaaccaaagttctctattgctttgcctccagagctctctgttgttgagtttgaggatcgctctaataactcatctcgtgctagcagtcgttcttcaactcgtaacaactcacgagactcttctcgtagcacttcaagacaacagtctcgcactcgttctgattctaaccagtcttcttcagatcttgttgctgctgttactttggctttaaagaacttaggttttgataaccagtcgaagtcacctagttcttctggtacttccactcctaagaaacctaataagcctctttctcaacccagggctgataagccttctcagttgaagaaacctcgttggaagcgtgttcctaccagagaggaaaatgttattcagtgctttggtcctcgtgattttaatcacaatatgggggattcagatcttgttcagaatggtgttgatgccaaaggttttccacagcttgctgaattgattcctaatcaggctgcgttattctttgatagtgaggttagcactgatgaagtgggtgataatgttcagattacctacacctacaaaatgcttgtagctaaggataataagaaccttcctaagttcattgagcagattagtgcttttactaaacccagttctatcaaagaaatgcagtcacaatcatctcatgttgctcagaacacagtacttaatgcttctattccagaatctaaaccattggctgatgatgattcagccattatagaaattgtcaacgaggttttgcattaaattgttttgtaattccagttgaatgtttattattattagttgcaaccccatgcgtttagcgcatgataagggtttagtcttacacacaatggtaggccagtgatagtaaagtgtaagtaatttgctatcatattaacatgtctagaggaaagtcagaactttttctgtttgtgttgttggagtacttaaagatcgcataggcgcgccaacaatggaagagccaacaacatatctaaaaatgttttgtctggtacttgttaatgatattgtttttgatatggatacac

SEQ ID NO: 14 - DNA, 27553 bp, Human coronavirus NL63
gtgtatccatatcaaaaacaatatcattaacaagtaccagacaaaacatttttagatatgttgttggctcttccattgttggcgcgcctatgcgatctttaagtactccaacaacacaaacagaaaaagttctgactttcctctagacatgttaatatgatagcaaattacttacactttactatcactggcctaccattgtgtgtaagactaaacccttatcatgcgctaaacgcatggggttgcaactaataataataaacattcaactggaattacaaaacaatttaatgcaaaacctcgttgacaatttctataatggctgaatcatcatcagccaatggtttagattctggaatagaagcattaagtactgtgttctgagcaacatgagatgattgtgactgcatttctttgatagaactgggtttagtaaaagcactaatctgctcaatgaacttaggaaggttcttattatccttagctacaagcattttgtaggtgtaggtaatctgaacattatcacccacttcatcagtgctaacctcactatcaaagaataacgcagcctgattaggaatcaattcagcaagctgtggaaaacctttggcatcaacaccattctgaacaagatctgaatcccccatattgtgattaaaatcacgaggaccaaagcactgaataacattttcctctctggtaggaacacgcttccaacgaggtttcttcaactgagaaggcttatcagccctgggttgagaaagaggcttattaggtttcttaggagtggaagtaccagaagaactaggtgacttcgactggttatcaaaacctaagttctttaaagccaaagtaacagcagcaacaagatctgaagaagactggttagaatcagaacgagtgcgagactgttgtcttgaagtgctacgagaagagtctcgtgagttgttacgagttgaagaacgactgctagcacgagatgagttattagagcgatcctcaaactcaacaacagagagctctggaggcaaagcaatagagaactttggttccaaaggtttctgattacgtttgcgattaccaagactggtattaacagttttagcaccttccttagcaacccaaacaacaccatcagaacgttgtctgaatttaaggtccttatgaggtccagtacctaggtaataaaaatgaactttaggaggcaaatcaacacgttgccccctgcgcatacgccaacgctcttgaacattccaataaccaatctgctcatctttattacccttaccaatagggacaagattcctgggaatgaccctatatggtgccttatcagaactaaccaaaagaggcatgtaaaatgaaggaggaggaaatttcttcctagcagctctgtcatcggcccaatttacactagccattttgtttagtttagattaaatgaagcaacttctctctttctgacaaaacaccctcctgagaggcaacaccagaaaaatcaccatgtttagcacggacgtagaatgcccaaccagtctggcttgtttcattaacagagcgaccaacacggtcacaaacaattgtggtactaggcgtagcaactattacatatttaggcaactgacccacttgaacacgagtagcaatcttatggccatcaacaagaagtacaccactaagaagtgttaatgtaacacctgtaggtgcagccatcaccggtaagtaataattatgtccgtaaacctggagagagatgattgcattagtttcaggattaaaagcccaaaaagttttaacacggcgccaaagtctgaaactattaacaaaatacataacccataaacaaagtgtaataatagacataagaatactaaaaccaaaaaagacccagtccacattaaaattgacaaaacagtcaaaaatagacaaagctagaacaagtggccataaacaccataaaacagacatctttaaaccataaagaagtctgctatacttataatgcccatactgcaacacaactataaaaagcgttagaattaaattccaactaaagttccagttacgtaaatggacataaacctctaaaagaggcacactactattagacatcgtttagtttagacatttagtacttcagctggaacaggtgctatttgcatataatcttggtaagcaagaaaaattttataaactggttgatataatgtcctactaaaaaaataatgacaagtaaaacacaattgaatcagtttaataaaggtcattgccaacacaaagaaaaatatcataacaaggagccataaaatggaattgaggacaataccattgtcatcaattaatcgaaggaacatcttcgtatagttgagaagagtagactataccaacaacaggctcttcggcaaaaatgtaaatgacagcaccattatacaagtcaaccttacgcataagttgtaggttcttttcacaagaacctctaatagcaacataaaggtcatcaaaagaaacaaaagtaatagtttcaccacctaaaacgacatagtggtcaccaccataaatagcagcaaaacgattttcataaaatgattgttcaagataccaacacttgcctgaaacgaagcatagtttagtaacattgaacaaaacaaatgaaaaatttttatagagataggcataatagccaacatgtatgaatcgaaacaacagcgtagaaaaaattataaaactgtcaagatacataccaaaaagaaccaataaaggcacatagacaaatagtgtcaatagttttaaaacaaaacaagcaacacgacctctagcagtaagaggtttgaataaagcaaagtaagtgacaaacaaactaactaacaaataagcagtaatagtactaagtgtagtaacaggtttaagattgtcacgcaagacagtaacatcatgaggtggtaatttgagattagccacactcttattaatagtactttcaagagtaagttgaaataggccaccaaaaggcattattgaacgtggaccttttcaaattcgtaataaggaagtttagttgaaccacaatcacaacagcctcgcattgatgaagttaaacaattgcaacaaccacaacaacctgtagaaagacaacaaaacacaagaagactcaacaatacaacaaaaacaacagaaataatgagccaaacccaccaaggccatttgatataattttcaaacctattaagcaacttcaaatcaacatatgtactgttaatctgatcaataagaccttgtaattcaacagtagtttgaaaaagactagcagttttagcttcgagttgcttcaactcagaactcaaattaagatatgttaaattaaaaggagtcaagtcaaaattaggcttaacatactttggtaagttttgtgcaaactcttgtaatgttttattaacatcaacgtagtcaggtatgacagtatgtaactcaacacgagatatgttaacaaaagtaacattacaattatatatttgcacaaaatcagacaaaacaggtaagcgaggttgaaacatgaccctggaagttacacgaaagacaccattatcagaataaagaaccaagttaggttgacgcagaacatagccataaatgccatcaacacagataccagaccacgcctttacattcttgtaatcagttggcagcaaaacagtatgaagaaaaagcaaaccatctggagctgagttgacgattgaaaagatgtgagtgccattgccacaaaaaccatatctattagattgtgacttgacacattcattaatcttctgctgtgctaagcgtcttgaaccacgaacttcagtatatttattcaaaacttgggaaacaaatgcattcaaagctgcaagccgtccagtaattaatctgtcaacttgttgatcggcttgaattgaatcaagccggtcataaatagcctgaattgaattagaaatggcctgaaaattatgtctcaattgtgaagtgagatggttaagagcactaccctgttgattaacaacatcctgaatcttattaagtgcaatagtaacagtatgtatagcctctgcagtttgtgtaatagcatcattaacgctactaaaagaagcaacaatattattaatagccttattaaatgatgcagccaaaattttctgattttcttgaagcacatcagtttgtaaagcaacatagttaagtcgtgcttgcagtgccaaagaaaaaggtatggcggctgctgatgtaagacctccgagcaccatgccacctataagagaacctgtgtacatggccatacgttcagcatcagcaacacctggcaaaaccattatgccattgtagtactgagcacaagcaaggtcagcaatagaaagacctttagtacaagacttatagtcaacatcaacagtacccaaaccagatgtaacaactttgctaaacaacaaatcttccaaagcactacgtcctgctatacggcttgaacgaatgtttctctgaggtaaaacactagaaaggttataatctccaaaactagtaacattagccaaactaaaagcattgctatcgaaagttagcatactactaacatcattagtttccaaatgagcactaagtcgtaaggcatcttcaatagttttacaagcagaagtatactgcttaagtagattcttacagcgagggttaccattacacacataagtagcacaatcaacaactattggagtactagtaatttggaggtactcaacttgaactgaagtagtccagttagaaggaatggataaattagcagtgattatggctgaaataccattatcactagaattacgcggacgaacaggaatcaaagaaccatcagcacaaataccaaaattagaataagtcataacggccgtagtgcaattgttaccaccattactaacataataaaagttaggtaactgtagtaagttttgcaagccatatctagactcattaacagcggtcatggcaccaataatgctttgttgataaacagctacttggtctggttggttacatggtgtcacaataaaaatgttaccagtggaaacatttttaaaaccaagtaaattaccagagttagaaacatatgtaataccaccagcaagtgactggtttgaagaacgtataattccagtaccaacataatcataaatattatatttggtacaattatttaaaactaaattactaaactcacgaataccagagacaggataaggtacaccagtaatagaattaccttcagaccaagtaacatacaaagcaccaacaatagtataagaagtgtaatgccaggtggcttcaagcggaaaattacaactaccaggcacttcgacggttgagaaacaaatagtcttgaacttttgaaaattatttaacttagaaaaagaaaatggacaagtgccactctttaaataaatgtgccatgaagagtcacctggtgaaccactcttaacgcggttataaatatacctaattgaaaaatgagatgttctaacacacactgaagtgttaccattaagagatatattaacctggtgtggtttacaaacataacaagaaccaccaaaagatgcagttgcagtaaaatttatgtccgtgtgttgataataaatggggagtgcaacataagtctcaggcaaaacattatcatcaagaaaatttgcagaataaaaaccatcctgcaatccaaactgcaagtgctcacactgcaacttttcaaatggagaatcgcaataaagtaagttttgaatgttagttgcactaacattaaccaaaacatcaacaaaagtagcaaatgcaaccgtccaaaaatctgtggcgctagcagtcgtgacattaaaattgacagcttctatgaaacccaaatcgaaatacttaaaaccattaatataaaactggccagttctagcaacaacaatttcacgcacagtgggtggtaaaatacccacaaaagtgctaacatgagtagtgttgatagtgctgtttataaaacagtaataaggttgagaggacgggccaaaaggtattgtggtgtcaagaacacctgaggaagaattactacaataaaacaaaacatcgtactgtaaagttttaaaaactataacaccactcttgagattgtccaaagaattagcactgaagttaagattgtaacgcataacatcaacaacagaattatgttgatagccgttacaattaacatcagaaccagtggcattaaaataaacaaaaccagttgaagatttaagaccaggtacaggccataaacaagttaaacggagtggttgataaagtctagagaccccgtccactagtgtggaaccattagttaacaaaaaccaattattaaaagggaaaccattaggaatgcggccatcctgttgaacagaaaatatgttatcagtataaccattacaatcatcacaaacagtgtagttaactacacggccattatgtgtggtgacattcacagtaacggtggcgttgacaacactaaaaacacaggaatagttaaagtaacatttaacactaagtttagtaagtttataagctgctggcacataaaaagtacgagttacattatataaatgcagacgcacagtttcaccagatatagttatgcccaaaggcgcacctaactgttctgtaaataacaaattaactatacagtcaaaagaactagaagcattacttaaaaaatcaaaagtagtgtttctactaaacttacaaatcttaagagtaacagaagcatttaagcctatttcattagtaacataaatataatactgattagcatcataataaccagtatggagcgcaaaagcactacggtgattaccaacatcaatataaaagaaaccattggctgagtaaacagatgtactctgattagcacaaaaccaatgagttggcaataaacccgtaacaatagttgaagaattgtcaggaacacctaattgtaacatagagagattagcattactattacatgtgaaaaagcaagaggccaggggcaaaacaagcaaaatcaagaaaagtttcatttagttgagactaaatgattactaaaaccaccaaaacgaccattattgcgtaacaacaacctaccactcttaatcaaactcaaaaccatatcatttacatcactatctttaagtgtaacaacaacagtggctttatgtttacattcaaacttacttaaatctaaaactgaattgtatgacaaagacataatagtagaattacgccaaaatatataattagcatgaacagtgttaccagctataaaaggaccttgaataaagtcacctaaataattaataccaataagaaaagcttctgaagaggatgtattaacagacgtgcaaaacaaagtccaaaaagcaaatctttgtattaattcataaagatacttattccaactatattctgtaatcttaatggcaacactaccaccaatagctaatttttctctaataacaccattaagataagtaaaaaacccatctttagagacattttcaccatcacaaaatttaattctaccatcatacatatcagaaataagtaagtcaaacttatcttcaagataaacagtagcacaatcacctgtaatgctaaaatctgcatcactaacataatcattgatatcattatcaatgattattgcatcgggtggtagccaacgttttaaaacagttgtaccaggtgccacacctttgtcagaaccagcaccatagtgcaaaacacgcatattatgaggtacgcacattgtagtgctatttaggtattgacaaagctgagtgtatttaacaacatttaacattataccactaggcaacttaataccagcaccataattatataaattacaaggttccaaacacatacgttgaagcttataaatttgtggcatagcataaccacacttccattcagcagactgcaactgtggataaaaagtggacaagtggttatctttacaccacaacatccacctataaggtttattatctataataacttcatgaactttagatattacaccaagatctaaactctttagtatagtaacaaagtcgtccaacaacaaatccatataagtacaaacaacttttgaactaagttcattaagataagtaacagtacagcacctcaaagttgtgtcagaagcagtgacaaaatcatcagctttcaaaacacccattttactaagcctaaactgtgatatcaacaaatgaagacctcctaatgtagtttttgaaacatcaccatatacaacatgttcaaaattaaaatcctcaagaccatatttattaataaaaacacccatatccatgttaagaaaatcatactccatatcacttcttggtgtaaagtctgataaattcctaccttgagtgtaaaaaccatcatagtgatcttgaaattgaccatttttacgaacatatatgtaccaattaactaatttttcaacacctttatcacccttaatagaagaaactggcataccattcaacataccaaaattcaactttataggtgttaaatttttaatgacaacagtagaaaataaaacagcgttcgtagtaagcgtaaaacgctcatacgaaccctgaatactattgtcaaaacaaacacaaacatcctcattaaaatcagtgtatttacatacactcttagtatatgaggtaaaaggtctttcagcttcataatcccataaaacaaatttatatgtagcaacaacaccgagatttttgagaatagacaatggtggtgttaaacccatttttcgttttgcaaacaattcaaaagcaacattagtaggcaatgttgttttatttgtaaaaaccaagttgtcaacatcgccatagcgaacaaaaactttgtcgttaacaactgcaacaggtaactcaccatcaacaccagtaaaacaccctttttttacaacattaaatgctatattttcaagactttgtaaattagtttcaataaaaatttgccacaaattataaacatcaaaactatgtggtacccaaatgttaaaacctgcctgtgtaaatgtattatatgcctcaacatatttttgatacaaatttgcatgttttgaacaaacagcaccacctatattacaacgagtaacacaactactagcgcgaaggggtacataattaacttgttcttgcacaacatcacaatcactgtcatcaaagtaaaaaaagggcataggttttaatttaacaaaagcacgtttatcatatgctggtgtatgaaacgcatgtttgttaacataaagagaaccaccattaacaccttctaaattaaaaacagaacgagtacgtgtgtcaaaacgacacacaattgaaaattctggatacatatcaacattacaattccagaataaacaaagaccatcaagttgaccatgggttgcataatcataatccaacaacttgacattactattaacaggttgcttgtcataacagtaccatttggcatcagtaacagcacaacgtacacctttaggattaccaatgtcatgaataacactaggtttatacaatttcaaggctgcacgaacaacatgtccctggacattacgcccacagccattgataaatttctcatttgcaataaaggggtacgttacagtccaatcaacatttttgacaaaacaatcatgtactgccaaacaacgtgtcataacagcatcaccagaggcatcatgctcgtttctatgaatgttacagaatgtgtggtggttttggctcaaggaaccaacataaccccactgttgtatatcaaaagcatacggattgtaaacataatcacaacccaatgcatgtttaaaacaacaatattcattactaactgaattataacaagtggcagaattaccacaataacaatatttaattggccctatttttacaaagtaacgcattgtagttaattccaaactacctgcccacaaaacaaagacaagaatgtcagacaaattggacaaataatcagatatcatttgcacaatgcgtctacgaacaattaaccaaggttgtcctttacgtaaaagaggaataaggtgtctaaattgttcacctggtggagattttgcacaaacaggtttaataacatcaccaaaattggtagacacacaaccttcagtttgcacaacaaaattaacaccatttgaaaaaccaacctgtaaaggaacattagtacctatgttatcgccacaaacatgagcactttcaacatccatacccaaccaaccacgcacattacgaatagcaaagtcacgtgtacaaaacaaactatgactaccaggaatactaatatcaaacctaaaacccataaatgatataacatgttcataagtacaaacgttatttgaacctatttgaacagctaaatcacctgtagtcttaaactgatctgacaacgacaagaaagtgtgtgcatgagttggtggtaaattaagaggagtgcgtgtacaatttttaaacaagccacaaacctggctagagtgtaaatctgcatgtttaatctcaaaaaacttaagtgaatcaaacaaagttttatcacacattacacaaaatatacccttcttagcacgtgttatagcaacattaaaacggtttacattgcaagcatgtgcagtgtcagaagtttgtgcatagattacataatcatactcactaccttgagaagaatcaacagtttgaatttgaagtcctaaaaatctactagcaacataattctgactattataaggagaaataaacacagccttactccaacttggatttttaactaaaaacagcttaactatttcaagctgctttctgttaatactagaaccattgtcaacctgtacattacccttaaaaaagactttaaaacactgtttactagcaggtttaacagggacaaacttgttctcataaacaagttcagaaactgtattaactatttcagcaggacatctataacatttatgaagaaaaacatcagggcctatagcacacatacgttgagtaacaacgttataatcaacaggctccataacacctttagtaatcattactctaggtgcaggaagttgttgtggatcaccaacataaacaatatgtttatatgataaacgctggttaataacagaaaggtcataatttgtacacattgaaacttcatctacaacaacgatatcagcattacactcaggtaatgcgttaacagtgctaaatatgtattgtgcactagtgttatttggtttaaagccactataacactcaacccgagctcttgcaggtataatcctagtacacttatcaatgctataaacagtcatagcttttgcacataaggaatcaacagcagcatgggcacaagcaacaaaaacaatacgcgcacctgggtagtacaatccaagtccaatggaacaatgtgacttaccactaccaggaggaccctgtattgtagttatcttttgtttaccaataagttggtaatatggaaccaaattagcatatgcatcactgacattaaaagcagggtgcaatttataaatgctagaatacttctcttggtttgcaatagttggtgcacgtaaaggttggacattgtgagatgttaagacaaaaatcataccaggaactaacttagtagttacagtagacttatacgtaacagtatcagaaccatattcaaccttctcaaagatgaactcacctatttggaattttgagtccttacttatttgaaaacaagtgaaaacagaattacgattcaaaggtggtttaactttaccactttcccaactaagaagcaattctttaggtccaacaacctctttaagagttgcaaaagcataagaagacttaacactctcttctttagctttaatagtttcagccgcaaagagtctaagtgtatctttaacatcattagcaagtttatagtccctaacatcagtccaatcagacgttgcaagcctattaaaaacttcaacatctaaggaaccagttgctgaatttttatataaaccaaatatattaccagctgaacataatggaaaagacaactgtggtttatgatttgtacaatagtaattcaaaccaccaagatacaattttttgacatcactaacaccacaacctgatgcattacatacatacggtgttatagccaaaataaacttgtggtcggtaccaaatacatgatcatatgcgcatttagtgcacaacataggcttacgcagacaatcaccacaacgaagtacagtttgtgaaccacaaacaacacataaaccagcagcttgcaatattgtagaattttcatacatactagcataaaaatcttcacaccaaaacttatcttcttgattatcaagaagtgtaacagaaaaagattcaagaacaccctcattcaaatttttgttaagatgcttaacccaatcaagtaatacgtaaaaaaccttacgatattcggaattagggtgttttgaaagagggtatgcatcaatagctaaagacacataacgttctaacaaaacaacagcatctgtcttaacaacatcatcaacaaaaacaccagctgacaagatcctactaggatctgggtaaggcaaataataggtaccatctttgtcaactatttgcatagtatgctgggaacaaaactcatgtggtcccttagttaaatcttcttcaacccaacatttagaagtactcataaagacattattctggtaatacaaagtggctttaaaagcactaatgtctgctatataacctaactcagcataatccttgttataacagacaacaccgtcatcagagagaatcatcattgaaaaatgtttcctaagataaccataataatcatcaatgaatgactcttcaacactagttaacctataacaattatcatacagacgtcgttgtagatccctaacattaacattattacatgaatctgatgggacactaagcaacctgttaatgttagaactcacggcttgaaaaatgttaaaaatagaattagcataagctgtactagcgtcaccagaagtcgtaccacctggcttaaaataaaaaccaccattagaataaacaacttctgttaaaacttgtgccaactcattaccaagcctataaaacctatctgttgcagtacaacaattaacatgcttagagcccaacaccatggctgaaatcatacgtatcatgttaggcaaagctctatcacatttgggataatcccaacccataagcatagggttttcaacaccatcaattaaagtacgcaacatattattccaaccaccataaaatttggtagtaccaataacaacagtggcattgcgtgtattaacaatggatttaagatgtttttgatggtattgtcttgtggtcattgtagacaacagagaaacaccaccaacagttctagcacgttctttaccactaatagcatacttaagattcagctgtgtcatagtagggaggacattacgctttgtcaaagcaaacaaagcatcctgttcttcataagatatagattcataatacaaactagctttaccaaacttatttaatggccaaccagcactcttattaagatttgttacaacaacttcacatgccttaatacagccaccttcataaatgtcaaaataacgagagactatcttatatgtaactctagcttgacaaatatctaaaatggtaggcttattataacggtaaaagtcaaaatctttaacagcagcatcaccattctgtgcgaagaagaaatgttttaatgtaagttcagaaccttcatcaaagaaacctcttaaacgaagaaagttataaaactcttcattaaaatgacctggcttaacaacttgatttgtcaaaccagtactcaatgctgcaacagaaaaacaaatagtgcgttgatcaacgagtgctggggaagaagctattatcaaggaagggtcggtgacaaattgcaaaagttcagtaattgtcaacctaactgagtgtgtgttaacatctttattccaaaccaaacctaattgcttaaaatgataaccagcagttgtaacaagtggaacaccatctataaaaactttacgacatagtggaccaaaagcagtacctggtatagttgtggcaaatagtgtattaaaattagcacaatgtataacacacatatcatcataacagtcactacaattaggatgataatcaaaactccaatgcttaaagtacttattgaataaattttctttatgttcagtgaaatcatacttaagcaaatcaaaagttttaaaatcactaccaaaaatatcactcttgacaaaacactcactagctaaacaattagttaaacccataataggcatcatataagaataatatgatgtacaacagggaacacccatattaggtaagctaacaacaaaatcaccaaaatcataaaagttaccattaagatcttggttatctaatgttaaaacaccaacaacacctttagcaaccatcgcatcgcatagagcaacgcatttaagcatagctctagctacaattttgccaagagatgcataaactctatgtatatcttcattttcaactgggtcataccaacccttactatcaaaataagaattgtcacaacaaccagttaaaactaatacttcttttagaacatcacaattttgttcatcaaagttacgcatagcatagaccaagtccatcatagtatatttagtaagattatgtctactaacattaccataaatgactctgccatctttccaagtaaagaaatcatgctcagccaaagcaccagaaaagttaagtaggttatacatggattgctcgtgttccataaccgacttagtacacctctttataacaaaataaccatccttaagatcagcatttttaaaacgaacacagttcatcttcaaacacttacccaagaatgaaacatttttattataaatgtcaaaagcacgaacacacttatcgatgtccgtgccattgcagggttctagtcgagctgcactagaaccccttgctcgtttaaataagaaatgtcaacactttgaatagttgtacggtcacaagcacacccgtgtcccaaccaacaaccacaaacattacacacattattttctaaacaaaacctaataggatccaaacaaccaataggaacctgaacacatttacccttaaacttacagtaaccatccatactagggtgaggaacgtgggcccgacaatacaaacaaatagacgctccaccataagaatcttgattggtgttagcatctacactagttgttatagcttgaccattaccagcaccattagataacatcttaatacaattacttacaggttttgcaccatgtttaacagcttccaagtaagtagttgctggatcaacagaaaaagcacaagcagttaaaagtccagaattaacagccaattcagtttgtttaccagcttgtagacgaattgtggcacctataaaaccaagaacggcacctctacgtaaggtatttaaatttttaacaaaatacaaatacttcacttgaggaccattaggtgtttcgaccataaatcgacaaggagagtctaactcgattgtgttgcaaccaccctcatactcccacttaacaaatttaaggtcagctttattagaaatataagcgtacataaaagttttaccaccctcagtattatacaaggcattaccatcacctaaaacaccaccatcaccctcagctttcataggtttttgcttaagtttaccaggcataatttcattattttgaagtttaacaacacgttcacaattaaggataagaggccatgtcaaagtttcaacattttcctttgtaatctctttaacatgaacaggtctaccatcattgtctttaacatcattaagtgtccaaacaactccagcataatgaacagaaccatcacaaacaatcttagaataagattcaagatctggactaacaatagttagtttagaagctgaagttgcaggtataactgacaatggcacaacaccatcacgtgctaaattcaaaacagtttcaacactagacatatccaaacgtcttaacattccaaaaagtaaagagtgcatagcactaataactttagattttctattaacagagcgtgcttctttatacatctgagtagcagcttgttcagccattctattaattttcttctgaacagatatctcatgatcaaattcagactttgcgatattcatggcacgcttcaattgtttaataagttgagaagaagatccattagcaatagcatcctcataagcttgtctagcattttcataagcaatatatgatggcatactaacaaatgatgaagcaacactctgaagggtgctactattatcaaaataagaatcaataaggccatcaagaccaaaatcactatgtttacttagaaagaacgcaaggagtgctaacaacatactttgagctttttcagggtcatcacaaagattaatcttattgtgtaaatcaacacaataagcccattcactagaattagctgcaatgttcatactagacaaacaacccaataacacaacattagtacacttcaaatcagtcagtttggattggacagttgaaatttttatacaacggtcaccaccaataccaagtagtttgaatgataaccaaagtgcatcaaaaggtccatgtggtgcatgaagtccattagcaaccatgtatttaaattcagcagcactcaccttaaaatcataaacacccatagtacatttaaaaaacctattgaaccaatacaaaatgccccaataagtacaaactaaataaccacaaattaaataaacaactaaagtaagtttcacatcaccaaaaacactaaatacactttcaggtgaaaaaaatacaatcaaacgtgacaacctaaaaacaatggcaccaatgtaccaatcactagatatagcacataaaaacataacaagcaaactcaaaaagtcaccactataaaaataagtgtaagcaactgctataagagaacacacatatgtaaaccaatgtgtaaaacgttctttagaaaagcgccatgtgtgtaaaaatacaacaaataaacagaccaaaacattaactaaaccctgaacatccatttgtaatactgaaacattatagttaaaatggtcagccaaaaattttactatgtaataatccaaaacacaattatataaagcagttgcaataacagtaggtaataaaaatacttgcaaaaacaaaaacttatgtttaagaaacatagttaaaactaatgacaaaaacaaaagtagacaaaatataggtgtaagtatcacagggtttatccatatagtgtttgtataaataaagagttctgcccaaaacattgtgaagaaaacgctaaataaaaacattgtttttaaaccaaaaataaccttaccactttgcaagttaacaccatacatctgcttcacaacttcagctagtgtgaactcatcacataaactagaataaccaagtatgtttttaccaccaaaaccttcatgaagatgttgaatggaagctaacaattgttcaacactaacaccagtttttgctgccaaaatagaatagcactcaacactagaaacacttgtataaccattagccatagcccattcattaaaaccatcaacattaactctagttgaacacaaccaccacctacaaccattcaacaaagcagcatacaaaaaggcaacaacattatctgatagcataaggttggcactctcaacttgcaaactaggttggtcatcaaaattaccataaacactaccagtaaaatcagaaccaacatgagcaccactacctaactcaatttggtgtaaataacaaaactcaacagtaccatcatttctaacattataaccaggagaaccacaagctccatttataaaagaacctttaatagtaaagtttgtacgtaaattaacaccaaaaacaccagatgcaataccttcataacatgctaaaatattaaaagaatcaccaggtttcaacgttttaaaaacatgtttaggtgtatgtacattagattgtgaaaccttaatacgcaacacagaaccatgcattgtaacaccgacaactcccaagaagacaccattatgagacactgaaaaattatgcaaacgcatagtactatatgcatgatcataatcaataagaacagtggttgatggtgctatgacatgtctaggacaagtaacagtgtcacctaaccaaactccattaagcacagtactaccataacagacgcgaaccacacatctctcaacacaaccagatggttgtgccatcttcttaagaccagattgtaaggtggaattgtagctaatagtaggtggagaatataacatgtcattatgatcttttgcataatctaacatagccttggctaaatgagcataacaagcacaacgataatcagcctcactagcactaccactataatatttatatttattataacttgcagcataattcttaagtttctcaggtgaaatagtatttatcagcctttcataagaacgcatgtcaagaacaaatgtacctgcagcagcactctcaaaagtacctataaacttatcaccttcaaacaattgagtagagatttttaacttaaaaacattaggtaaaagctctaaaaatgcagcaaaactaaaccatgtgagaagccaccatggtattaacaagaagtatgcaacaatgtatgcaatatgccaaatccaagcataacgcactgtcctagtaaaaacaaaatacaaaatagcataaagcaacataaaaaataaattttgagtaacaacataagaaatgttattaatcaaagttgcacaaacaacagtaaaaacaccataagaaagatcaccaaaaacacgtttaaatttagtaactaaaaagcacaaaaatgtaataaatgctgcaaaaagaaaattaaacaacatatgtccagacatagccacaacgctaaaagatgaactaaagattgagagtacattaacaagaaggtctataagaccatcaccacaaatgtaaccgtcatcaacacgtccatcattaacataccatttatcaaaaccaaaacaaacacctttatgtgagtcacggcattcaccaactctacaataacgtgtagccaaagttctaatagtacgtaagccaaaacctctagctaaaatttctggaaaacgtacataatttttagcatcatacttataatacgcattgggctgtaaagtactataaggtttagaaccttcaataagatcagtgttgtaacaataaacattgtcaccacccaaaccttccaacctagtacaagcagaattaaaaatacacttatcactagtggtaacaccatcaaagtcataacaaacacctgtgtttccaaaagcagcctgtaatgtaaaaacaagagtctttcctaccaaatatacatttgttggaacaccaggaacaacattaatacgctctgaaacaccaacaactataggacatttatcactattagtagtaacaacaccaaacttagcctcatgccattgattaaaattatcaaaaacattacgaacacagtgtaaaggtgcttcaaacaccttcaactgaccattctcaatgtacttaaaatcataaccatgaaagctagttacagtggttgtataatcaataaatgagacaccaataaacaatgcaacaacaaataaacatacataccacagaaaattataagtacgtttaaaaccagcaccctgttttgcaactatactagtagcaggaacttgtgtaattgcttggttatcattaaaagttaataaaaaagtcaaaccctttgctttagttgttttaacaaggtacttcttaccttcttgagaaagagtattaaagtccttgacaccccaaacaataggtattgactctttaattaaaacattatggttaacaaccttagaaccggcacgcatacaacaagcaatgtcataaacggacaacttatcttcaggtttagcataagaaataaaaaaattattaaatgacaaatctgaaagcaaaacgtcatacctatgtgcattggcaacagctgaaacaaaatcatcatcagaaacagtcaaaccaagtgtagctttacattcagccatggacatgttagcagttaactccttaaaaaaactattacacaaaacatcaacatatgccttatgcaaaacaccattaaaatcaacagataaagttgacaacaactctgaatttaccaactttataggttcacacaacaattgagaaaaataaacacaagcatttttaatctgtgtaatgttactaccactattattgtaaacaataaaattttctaaaacattacaattcttcagaacctctttacaactatacttagattcagtaatgtcaaagtcataccgccaaaaagtgtcaccactataaagacgataaaatccattaacaaaatctaccttatcaataataacatatgcaggagctgtgggttgaacagctgttttaacaacattaccaagctctcttgcaatatcaccattaataaaagtattaccaggcccaaaagaatcacaattaacacaaaagaagttatgtttattacagaaacaagtaccaccattagcattaacatagaatgatttatgcataccattaataatagtttgaagtggtacacgtttaagtctagcacttttagaacaagctacacagtcagcattattacagccaacaataatatgtctaacaaataaaacgattttgcagacaataaatgtagctaaaaactcattacataaaacatcaaacggcacaaaatgtaaaaaccactgtttctgatgaaagcctaagaaagaaccaaaagtactaataaattgtgcaacaaaatataaaagtccaaaacgcaaatacatattaccaaaaattaacaaaataacaagtataacaaatggttgtaaactgattaatataggatcacgaatgtgcttccaaacaagactagtatgatccaaatcattaaactcttgataactgaacaaacacatcttacaaaccatagaattaccacaataaatatccttattaaaagtggatttttcataaccacttacaatgtcaccacataaaagactattaaaaggactaaattgcacaatcataaaaacaagtgcataaatagcatataataataataagaacttaaacaaagtaacaataacacaccacttctgctttataacaaacaaagcagatctaatgttatacttaaaactacgtgtcaaaataacacctgtacgtttaggagccttggcaataactttaatatcatgcttcataatagaagtacgtaaaagactaaacatactaagcaaccaagttaaaaacagaacaatgttattcataacaaaatcaccaaattggaaaaatttttgtgcaccagtatcaagtttatccataacagaaattttctcactaacaattgttggaacattagatgttacacaaccacctactacaacaatagctgtaacagctaaagtagacaaatctgaagaaaataaacgagcaccatcatagacagcattattagcagcatcataaactacatagtgaccgttatcaaaagaacctgaaaatgttgtataagcaataccattaagcaacttagaaggttgtgaaattataggttcaccaacattggtaataacaacacgtccattaacaaacttaacacgtgaacgcaatttatgtctgtgtggacaaaaaccaacatcacaaccatctttaagcacactagcacagacaatagcacttttaacttcaactacagtacttttacaaatgtcacaagttgaatattgttcaagagtaacaatagaatcactaatcaaatactctgacaatttagataatgcctcttcagcatcacccttttgaccctttgaagacatagttataaaataaataaaactaacaaaaggtccaacatcacctgtaacaaatttgttccaaagaacatttaaacccttagatttaaaagtaggcttaagatactgtaaaattatacaagttgcattaacccaacaattattgtcggtggtcccaagaactctaaaaccaccaacaaaatcattagggtaaccatatggctttacatccaaagaagcaaaaagtgctgccttttcaaaaccgtaaaaagcaacccagtcaacttctggagctacagataagacagtatcagtattaataggtaaaacaccttcaaaagagtcaacaccatcactcacaacacccaattgtttaccaagtgacttagaagactcaacaacaacatctttaacattaataccatcttcagtaattttcaaaactacattatcattcttaaaacagtcgttaacatccataacattactctctacaacaaatttaacagttaaagtcaaacttgaaagaagctttttcaaaacatcaatagcaggaacattggcaataacacaagttttcaatctattaagtttacgcacacaacgaccaagatttttatcaaaagaaagatcatttatcgatggtacaacacacatataaatggtacaactctcaacaaaaagtttaaccaaattaccagctggtacagttttaactgtagcaagataatcaagagctgcctgttgcaaaataccattaagttttgtgtccaataattgtccttgtttatccaacattaaaatagagttagtaaataataagtaaatatcaccatccaaggcattgacaccacaatcaaagaatgaaaaattaccttcaactctaaaaggtttaacaacatcaacatcatcaatgactggtgttaaatctaaaccatctaaaaacttaagaacagcttgttcttcatttgaagaataaacaaaaacttgcaatggtttattaatgtcacaactaaacaaagctttaagagaattttcaatccttacaccaaaaataccacaactaagaagaggcataagtggaataccattttcaaataaaatagaattataagcttcaacaagtaatgaatgctcatgtttaccagttcgcggaccaacaacattaaatacgttgaatttttcacactccaacataacacctgctccaaccttaagtggaccattactactaatgtaatctttagataatgactgaagttgaccttcagtcaaaatatcaatagcacgtgcaacaccgcctccatgcaagagattttcattagcagcattgacaacaaagtcaaaagaaacacagtttacaaggtgtgaaatatcacctaaataaaatttaacatttttatatacagcaaaaggtttaacttcaccagcttctatttctacactatgaaaatcaacatcaacaaaacaaacagtattaacactactatttttaatgtcaaagacaccaaaaccatcaatagctttgttaaaactgtataaatttgtttgataatgaccagaacccttaacacctaaatatacagatgaacatataggtttcacagggaaagcatcaatgtcaataggtgctggatcctgtacaaacacaccagtacctttcatactaacaagcttataagtctgcattttatgacaaatacaacactcacctttttgaaaaagttttgtgtaaggcataatccaaaacaaacaaccaacctgatcatcaaactttttaccacaatcacaagacatctcaaaagttatagaacatgtatatttttctttaagaagttcactaagaagtttaccactatcaccaagtgaaccactaattaaatgagacaactcataacacttttggacaattgaatcaactttaccaactttaaacaattgcatctcaatagaatcatccaaaagctttgtaagttgcaactgtacaagtgtggtactaatccaacaattattatcagattgatctaaaacacgaacacccaattcatctctaaaagaaaaagaaaaaggttgcttaattgagagcacatgttcaacttcttcaaaaggttgttcaattatatcaacctcttctctaacagagtcatcaacaatacattctaattgatgaaaatcagtgctcgcttcaacaacacaaccattactatcattactaataggccattgtgaaatcataactggtttagaaacatcataaccaccctcttcatcataaatataaaattgtggcaacttaatatgttgcccaatgacattcattgcagatgtaagaacttcatgtagaccttcccaatcacctgtataaataatggacttaccaaaactcttcttacaaagactggtaacaacatcatcttcaaactcaaatatgagcttgactttatgggtaggttcaacatcatgaactataacatcatcagaaaaagatattttaccaccagctaattttgtaaaagcaacaggcaatacaccattacatgaagctggataataaatgtcatctacaacataccaaagataatcaccagaaacaaaaaattgaccaccatccttaggttcaacaaaaacagtttctttaagctctaaatgttcaacatcaatggcattaggtttactaacaccaaaacaagtgtctaaaaattcatagaaaaaggtgacacaactaacacaaggaaaagtcatgtcacacctttctctacgaattacacgacttacaaaaccactaataactacatatggaacattaacagcataatatttgatgcaaacaccagcagtgtatgcgacactacagacagtttcaagaaaaccattatagacatcaagcaattttaccaaaacacgtctaaaacgtttggcacaattacctaaaagaccattagaagtaagtgtaagcttaagagtttttaaccaatctgtaacaaaattaaacttttcaacaaaaagattccataaatggccatcatcaatactcaacagtatttcaggacacttaggtaaaaacctctcaagcaaaactttagactctgatgcttgaacaatagcacattgagggttattactctgcaagatagcattataatcagtcaaaaaccatggctcaccacaattatcaatgcagaattgctcccaaacattataacagtccttaaaacacacatgtgtagcgaatgtagcatcacgtctaacaatgacactacagccatcaaccacacatgtgtacacaaaaactgcagttttaaaatccaataacaacagctcaacagcaataatggcatctgtagcagaactagcagtaacaaactgatggttaaaaccatcaagcttaaaaccactaaacttaatagtgtagaataaatcaccagtaaaaacaggatcatttaatacagttgtaggatcaaccataaaacgataaaaaccaccactatagaaaaaagcttgtccagcaataacaacaatcttacctttagggcaaactacaggtgcacaatcaacaagacgcaaattaacagtggcaagttcaataacagaaaacttaacttcagttgtaggacctacaactactttagtaaacatggctttctttatgcgagcatcacgaacaccacgaacaacttcagtagtcaaacgaacaagagcgttttcagtaagaacataatcaccaagtcgtttaaatttaacatcaccaattttaaatacatctaaagaaaaatcaaatgcagcacaaatagcttgtgtaaatgtgcgataaactgattgaaaagcatctggaacatctgcacacataataataacaccattagagacagttaaaacagttgaagcaatagacttaacaaacctaaccaaaacaccagtagtagttggtacaagcttaatagcggcaacaaaagcatcccagattgcatcaaaaagcccagaagctttgcgtacaaaccaaggtttattgtttgtcaatatgtcatcgtaaagaccaaacataccagcactaatgtcaataacaccagtgctagcagcaaatttaacatcttctgtaacagaagcaccaagaaaagctagacgtaattgattagaaagtaaagtgttaacatcaaagcaaaaagggtctaatgaatttctatgcaagagtgcatcataagaagatgatgccacaaacattccatcagaatgaacagctgtaacacgccataaagacacaccagtaatgttagtaatatgtttaacaactaagccagcatagtatttaacaccacaaccagcactagttgaggtgatgatcacatcaccaggaacgacattaccaggaacaacacaaagtttcttagcaggtgtgccacaacaagaagataagtaaccatcccatgcaccaacactccaactctcagaaccacaattgcatttaacaaaagcattaaagaaaactggtttaacaattatatctagcaatgacataccatttgtaataaatggtgaaccaaacgccctatacacagcattccattcaccactcaaaacaaccttagaagaatatttaggcggcttagcattagtaagtttgcaaccagacttcaaagtatgacctgtagtaccaaggtaatgaatgctctcaatggctaaaacattttgctgttcataagaaaggtctttacgtataacatcccatgctagttgataagtgacaccaccaataacaatactatcagtattattattaaagtaatccctaaattcccacatgtttttaggtaacacaggtttaccatcaaaaccacacatgtacttatccacaaaaaccacacttcctgcaccatggccaaaaacaacatcaaagtcctgaagaacataattgctgttagaaaaaatgagccaacctcgcaaattaaggggtctatcagaaaaaggtaaaattttggcacagagctgattagtaccagtcaatgcaatgacataatcatcatcattaataccggttacacaatcctgtaagccaaaagcaacaaaacggcatgcctgaaaaccttgtgcagcggcttcgctataggtgcgaacggctacagaaggaatggcaaaaccaaaacctgaaatttccgaatcacttgcaacagcaagtgtcacttgattgtaaaacatggttagcagttattggtttccacaacgacagaacgttgcttccacaataagcagtgacggaacaccacttaaatatcaatgtatgcactagtgaacagaatcaccagtgcttagacacagaaaatacaacacttgcctaaccagtttacaaacttgacgaaatttcaattacactaggactgccataacaaatgacagcactagaaaaatttcgtttagttgagaagagtagacacaaagtctaaataagaaaattctctatctatagatagaaaaattctttaag

SEQ ID NO: 15 - RNA, 27553 nt, Human coronavirus NL63
cuuaaagaauuuuucuaucuauagauagagaauuuucuuauuuagacuuugugucuacucuucucaacuaaacgaaauuuuucuagugcugucauuuguuauggcaguccuaguguaauugaaauuucgucaaguuuguaaacugguuaggcaaguguuguauuuucugugucuaagcacuggugauucuguucacuagugcauacauugauauuuaagugguguuccgucacugcuuauuguggaagcaacguucugucguuguggaaaccaauaacugcuaaccauguuuuacaaucaagugacacuugcuguugcaagugauucggaaauuucagguuuugguuuugccauuccuucuguagccguucgcaccuauagcgaagccgcugcacaagguuuucaggcaugccguuuuguugcuuuuggcuuacaggauuguguaaccgguauuaaugaugaugauuaugucauugcauugacugguacuaaucagcucugugccaaaauuuuaccuuuuucugauagaccccuuaauuugcgagguuggcucauuuuuucuaacagcaauuauguucuucaggacuuugauguuguuuuuggccauggugcaggaagugugguuuuuguggauaaguacaugugugguuuugaugguaaaccuguguuaccuaaaaacaugugggaauuuagggauuacuuuaauaauaauacugauaguauuguuauugguggugucacuuaucaacuagcaugggauguuauacguaaagaccuuucuuaugaacagcaaaauguuuuagccauugagagcauucauuaccuugguacuacaggucauacuuugaagucugguugcaaacuuacuaaugcuaagccgccuaaauauucuucuaagguuguuuugaguggugaauggaaugcuguguauagggcguuugguucaccauuuauuacaaaugguaugucauugcuagauauaauuguuaaaccaguuuucuuuaaugcuuuuguuaaaugcaauugugguucugagaguuggaguguuggugcaugggaugguuacuuaucuucuuguuguggcacaccugcuaagaaacuuuguguuguuccugguaaugucguuccuggugaugugaucaucaccucaacuagugcugguugugguguuaaauacuaugcuggcuuaguuguuaaacauauuacuaacauuacuggugugucuuuauggcguguuacagcuguucauucugauggaauguuuguggcaucaucuucuuaugaugcacucuugcauagaaauucauuagacccuuuuugcuuugauguuaacacuuuacuuucuaaucaauuacgucuagcuuuucuuggugcuucuguuacagaagauguuaaauuugcugcuagcacugguguuauugacauuagugcugguauguuuggucuuuacgaugacauauugacaaacaauaaaccuugguuuguacgcaaagcuucugggcuuuuugaugcaaucugggaugcuuuuguugccgcuauuaagcuuguaccaacuacuacugguguuuugguuagguuuguuaagucuauugcuucaacuguuuuaacugucucuaaugguguuauuauuaugugugcagauguuccagaugcuuuucaaucaguuuaucgcacauuuacacaagcuauuugugcugcauuugauuuuucuuuagauguauuuaaaauuggugauguuaaauuuaaacgacuuggugauuauguucuuacugaaaacgcucuuguucguuugacuacugaaguuguucgugguguucgugaugcucgcauaaagaaagccauguuuacuaaaguaguuguagguccuacaacugaaguuaaguuuucuguuauugaacuugccacuguuaauuugcgucuuguugauugugcaccuguaguuugcccuaaagguaagauuguuguuauugcuggacaagcuuuuuucuauaguggugguuuuuaucguuuuaugguugauccuacaacuguauuaaaugauccuguuuuuacuggugauuuauucuacacuauuaaguuuagugguuuuaagcuugaugguuuuaaccaucaguuuguuacugcuaguucugcuacagaugccauuauugcuguugagcuguuguuauuggauuuuaaaacugcaguuuuuguguacacaugugugguugauggcuguagugucauuguuagacgugaugcuacauucgcuacacauguguguuuuaaggacuguuauaauguuugggagcaauucugcauugauaauuguggugagccaugguuuuugacugauuauaaugcuaucuugcagaguaauaacccucaaugugcuauuguucaagcaucagagucuaaaguuuugcuugagagguuuuuaccuaaguguccugaaauacuguugaguauugaugauggccauuuauggaaucuuuuuguugaaaaguuuaauuuuguuacagauugguuaaaaacucuuaagcuuacacuuacuucuaauggucuuuuagguaauugugccaaacguuuuagacguguuuugguaaaauugcuugaugucuauaaugguuuucuugaaacugucuguagugucgcauacacugcugguguuugcaucaaauauuaugcuguuaauguuccauauguaguuauuagugguuuuguaagucguguaauucguagagaaaggugugacaugacuuuuccuuguguuaguugugucaccuuuuucuaugaauuuuuagacacuuguuuugguguuaguaaaccuaaugccauugauguugaacauuuagagcuuaaagaaacuguuuuuguugaaccuaaggaugguggucaauuuuuuguuucuggugauuaucuuugguauguuguagaugacauuuauuauccagcuucauguaaugguguauugccuguugcuuuuacaaaauuagcuggugguaaaauaucuuuuucugaugauguuauaguucaugauguugaaccuacccauaaagucaagcucauauuugaguuugaagaugauguuguuaccagucuuuguaagaagaguuuugguaaguccauuauuuauacaggugauugggaaggucuacaugaaguucuuacaucugcaaugaaugucauugggcaacauauuaaguugccacaauuuuauauuuaugaugaagagggugguuaugauguuucuaaaccaguuaugauuucacaauggccuauuaguaaugauaguaaugguuguguuguugaagcgagcacugauuuucaucaauuagaauguauuguugaugacucuguuagagaagagguugauauaauugaacaaccuuuugaagaaguugaacaugugcucucaauuaagcaaccuuuuucuuuuucuuuuagagaugaauuggguguucguguuuuagaucaaucugauaauaauuguuggauuaguaccacacuuguacaguugcaacuuacaaagcuuuuggaugauucuauugagaugcaauuguuuaaaguugguaaaguugauucaauuguccaaaaguguuaugaguugucucauuuaauuagugguucacuuggugauagugguaaacuucuuagugaacuucuuaaagaaaaauauacauguucuauaacuuuugagaugucuugugauugugguaaaaaguuugaugaucagguugguuguuuguuuuggauuaugccuuacacaaaacuuuuucaaaaaggugaguguuguauuugucauaaaaugcagacuuauaagcuuguuaguaugaaagguacugguguguuuguacaggauccagcaccuauugacauugaugcuuucccugugaaaccuauauguucaucuguauauuuagguguuaaggguucuggucauuaucaaacaaauuuauacaguuuuaacaaagcuauugaugguuuuggugucuuugacauuaaaaauaguaguguuaauacuguuuguuuuguugauguugauuuucauaguguagaaauagaagcuggugaaguuaaaccuuuugcuguauauaaaaauguuaaauuuuauuuaggugauauuucacaccuuguaaacuguguuucuuuugacuuuguugucaaugcugcuaaugaaaaucucuugcauggaggcgguguugcacgugcuauugauauuuugacugaaggucaacuucagucauuaucuaaagauuacauuaguaguaaugguccacuuaagguuggagcagguguuauguuggagugugaaaaauucaacguauuuaauguuguugguccgcgaacugguaaacaugagcauucauuacuuguugaagcuuauaauucuauuuuauuugaaaaugguauuccacuuaugccucuucuuaguugugguauuuuugguguaaggauugaaaauucucuuaaagcuuuguuuaguugugacauuaauaaaccauugcaaguuuuuguuuauucuucaaaugaagaacaagcuguucuuaaguuuuuagaugguuuagauuuaacaccagucauugaugauguugauguuguuaaaccuuuuagaguugaagguaauuuuucauucuuugauuguggugucaaugccuuggauggugauauuuacuuauuauuuacuaacucuauuuuaauguuggauaaacaaggacaauuauuggacacaaaacuuaaugguauuuugcaacaggcagcucuugauuaucuugcuacaguuaaaacuguaccagcugguaauuugguuaaacuuuuuguugagaguuguaccauuuauauguguguuguaccaucgauaaaugaucuuucuuuugauaaaaaucuuggucguugugugcguaaacuuaauagauugaaaacuuguguuauugccaauguuccugcuauugauguuuugaaaaagcuucuuucaaguuugacuuuaacuguuaaauuuguuguagagaguaauguuauggauguuaacgacuguuuuaagaaugauaauguaguuuugaaaauuacugaagaugguauuaauguuaaagauguuguuguugagucuucuaagucacuugguaaacaauuggguguugugagugaugguguugacucuuuugaagguguuuuaccuauuaauacugauacugucuuaucuguagcuccagaaguugacuggguugcuuuuuacgguuuugaaaaggcagcacuuuuugcuucuuuggauguaaagccauaugguuacccuaaugauuuuguuggugguuuuagaguucuugggaccaccgacaauaauuguuggguuaaugcaacuuguauaauuuuacaguaucuuaagccuacuuuuaaaucuaaggguuuaaauguucuuuggaacaaauuuguuacaggugauguuggaccuuuuguuaguuuuauuuauuuuauaacuaugucuucaaagggucaaaagggugaugcugaagaggcauuaucuaaauugucagaguauuugauuagugauucuauuguuacucuugaacaauauucaacuugugacauuuguaaaaguacuguaguugaaguuaaaagugcuauugucugugcuagugugcuuaaagaugguugugauguugguuuuuguccacacagacauaaauugcguucacguguuaaguuuguuaauggacguguuguuauuaccaauguuggugaaccuauaauuucacaaccuucuaaguugcuuaaugguauugcuuauacaacauuuucagguucuuuugauaacggucacuauguaguuuaugaugcugcuaauaaugcugucuaugauggugcucguuuauuuucuucagauuugucuacuuuagcuguuacagcuauuguuguaguaggugguuguguaacaucuaauguuccaacaauuguuagugagaaaauuucuguuauggauaaacuugauacuggugcacaaaaauuuuuccaauuuggugauuuuguuaugaauaacauuguucuguuuuuaacuugguugcuuaguauguuuagucuuuuacguacuucuauuaugaagcaugauauuaaaguuauugccaaggcuccuaaacguacagguguuauuuugacacguaguuuuaaguauaacauuagaucugcuuuguuuguuauaaagcagaagugguguguuauuguuacuuuguuuaaguucuuauuauuauuauaugcuauuuaugcacuuguuuuuaugauugugcaauuuaguccuuuuaauagucuuuuauguggugacauuguaagugguuaugaaaaauccacuuuuaauaaggauauuuauugugguaauucuaugguuuguaagauguguuuguucaguuaucaagaguuuaaugauuuggaucauacuagucuuguuuggaagcacauucgugauccuauauuaaucaguuuacaaccauuuguuauacuuguuauuuuguuaauuuuugguaauauguauuugcguuuuggacuuuuauauuuuguugcacaauuuauuaguacuuuugguucuuucuuaggcuuucaucagaaacagugguuuuuacauuuugugccguuugauguuuuauguaaugaguuuuuagcuacauuuauugucugcaaaaucguuuuauuuguuagacauauuauuguuggcuguaauaaugcugacuguguagcuuguucuaaaagugcuagacuuaaacguguaccacuucaaacuauuauuaaugguaugcauaaaucauucuauguuaaugcuaauggugguacuuguuucuguaauaaacauaacuucuuuuguguuaauugugauucuuuugggccugguaauacuuuuauuaauggugauauugcaagagagcuugguaauguuguuaaaacagcuguucaacccacagcuccugcauauguuauuauugauaagguagauuuuguuaauggauuuuaucgucuuuauaguggugacacuuuuuggcgguaugacuuugacauuacugaaucuaaguauaguuguaaagagguucugaagaauuguaauguuuuagaaaauuuuauuguuuacaauaauagugguaguaacauuacacagauuaaaaaugcuuguguuuauuuuucucaauuguugugugaaccuauaaaguugguaaauucagaguuguugucaacuuuaucuguugauuuuaaugguguuuugcauaaggcauauguugauguuuuguguaauaguuuuuuuaaggaguuaacugcuaacauguccauggcugaauguaaagcuacacuugguuugacuguuucugaugaugauuuuguuucagcuguugccaaugcacauagguaugacguuuugcuuucagauuugucauuuaauaauuuuuuuauuucuuaugcuaaaccugaagauaaguuguccguuuaugacauugcuuguuguaugcgugccgguucuaagguuguuaaccauaauguuuuaauuaaagagucaauaccuauuguuuggggugucaaggacuuuaauacucuuucucaagaagguaagaaguaccuuguuaaaacaacuaaagcaaaggguuugacuuuuuuauuaacuuuuaaugauaaccaagcaauuacacaaguuccugcuacuaguauaguugcaaaacagggugcugguuuuaaacguacuuauaauuuucugugguauguauguuuauuuguuguugcauuguuuauuggugucucauuuauugauuauacaaccacuguaacuagcuuucaugguuaugauuuuaaguacauugagaauggucaguugaagguguuugaagcaccuuuacacuguguucguaauguuuuugauaauuuuaaucaauggcaugaggcuaaguuugguguuguuacuacuaauagugauaaauguccuauaguuguugguguuucagagcguauuaauguuguuccugguguuccaacaaauguauauuugguaggaaagacucuuguuuuuacauuacaggcugcuuuuggaaacacagguguuuguuaugacuuugaugguguuaccacuagugauaaguguauuuuuaauucugcuuguacuagguuggaagguuuggguggugacaauguuuauuguuacaacacugaucuuauugaagguucuaaaccuuauaguacuuuacagcccaaugcguauuauaaguaugaugcuaaaaauuauguacguuuuccagaaauuuuagcuagagguuuuggcuuacguacuauuagaacuuuggcuacacguuauuguagaguuggugaaugccgugacucacauaaagguguuuguuuugguuuugauaaaugguauguuaaugauggacguguugaugacgguuacauuuguggugauggucuuauagaccuucuuguuaauguacucucaaucuuuaguucaucuuuuagcguuguggcuaugucuggacauauguuguuuaauuuucuuuuugcagcauuuauuacauuuuugugcuuuuuaguuacuaaauuuaaacguguuuuuggugaucuuucuuaugguguuuuuacuguuguuugugcaacuuugauuaauaacauuucuuauguuguuacucaaaauuuauuuuuuauguugcuuuaugcuauuuuguauuuuguuuuuacuaggacagugcguuaugcuuggauuuggcauauugcauacauuguugcauacuucuuguuaauaccaugguggcuucucacaugguuuaguuuugcugcauuuuuagagcuuuuaccuaauguuuuuaaguuaaaaaucucuacucaauuguuugaaggugauaaguuuauagguacuuuugagagugcugcugcagguacauuuguucuugacaugcguucuuaugaaaggcugauaaauacuauuucaccugagaaacuuaagaauuaugcugcaaguuauaauaaauauaaauauuauagugguagugcuagugaggcugauuaucguugugcuuguuaugcucauuuagccaaggcuauguuagauuaugcaaaagaucauaaugacauguuauauucuccaccuacuauuagcuacaauuccaccuuacaaucuggucuuaagaagauggcacaaccaucugguuguguugagagaugugugguucgcgucuguuaugguaguacugugcuuaauggaguuugguuaggugacacuguuacuuguccuagacaugucauagcaccaucaaccacuguucuuauugauuaugaucaugcauauaguacuaugcguuugcauaauuuuucagugucucauaauggugucuucuugggaguugucgguguuacaaugcaugguucuguguugcguauuaagguuucacaaucuaauguacauacaccuaaacauguuuuuaaaacguugaaaccuggugauucuuuuaauauuuuagcauguuaugaagguauugcaucugguguuuuugguguuaauuuacguacaaacuuuacuauuaaagguucuuuuauaaauggagcuugugguucuccugguuauaauguuagaaaugaugguacuguugaguuuuguuauuuacaccaaauugaguuagguaguggugcucauguugguucugauuuuacugguaguguuuaugguaauuuugaugaccaaccuaguuugcaaguugagagugccaaccuuaugcuaucagauaauguuguugccuuuuuguaugcugcuuuguugaaugguuguagguggugguuguguucaacuagaguuaauguugaugguuuuaaugaaugggcuauggcuaaugguuauacaaguguuucuaguguugagugcuauucuauuuuggcagcaaaaacugguguuaguguugaacaauuguuagcuuccauucaacaucuucaugaagguuuuggugguaaaaacauacuugguuauucuaguuuaugugaugaguucacacuagcugaaguugugaagcagauguaugguguuaacuugcaaagugguaagguuauuuuugguuuaaaaacaauguuuuuauuuagcguuuucuucacaauguuuugggcagaacucuuuauuuauacaaacacuauauggauaaacccugugauacuuacaccuauauuuugucuacuuuuguuuuugucauuaguuuuaacuauguuucuuaaacauaaguuuuuguuuuugcaaguauuuuuauuaccuacuguuauugcaacugcuuuauauaauuguguuuuggauuauuacauaguaaaauuuuuggcugaccauuuuaacuauaauguuucaguauuacaaauggauguucaggguuuaguuaauguuuuggucuguuuauuuguuguauuuuuacacacauggcgcuuuucuaaagaacguuuuacacauugguuuacauauguguguucucuuauagcaguugcuuacacuuauuuuuauaguggugacuuuuugaguuugcuuguuauguuuuuaugugcuauaucuagugauugguacauuggugccauuguuuuuagguugucacguuugauuguauuuuuuucaccugaaaguguauuuaguguuuuuggugaugugaaacuuacuuuaguuguuuauuuaauuugugguuauuuaguuuguacuuauuggggcauuuuguauugguucaauagguuuuuuaaauguacuauggguguuuaugauuuuaaggugagugcugcugaauuuaaauacaugguugcuaauggacuucaugcaccacauggaccuuuugaugcacuuugguuaucauucaaacuacuugguauugguggugaccguuguauaaaaauuucaacuguccaauccaaacugacugauuugaaguguacuaauguuguguuauuggguuguuugucuaguaugaacauugcagcuaauucuagugaaugggcuuauuguguugauuuacacaauaagauuaaucuuugugaugacccugaaaaagcucaaaguauguuguuagcacuccuugcguucuuucuaaguaaacauagugauuuuggucuugauggccuuauugauucuuauuuugauaauaguagcacccuucagaguguugcuucaucauuuguuaguaugccaucauauauugcuuaugaaaaugcuagacaagcuuaugaggaugcuauugcuaauggaucuucuucucaacuuauuaaacaauugaagcgugccaugaauaucgcaaagucugaauuugaucaugagauaucuguucagaagaaaauuaauagaauggcugaacaagcugcuacucagauguauaaagaagcacgcucuguuaauagaaaaucuaaaguuauuagugcuaugcacucuuuacuuuuuggaauguuaagacguuuggauaugucuaguguugaaacuguuuugaauuuagcacgugaugguguugugccauugucaguuauaccugcaacuucagcuucuaaacuaacuauuguuaguccagaucuugaaucuuauucuaagauuguuugugaugguucuguucauuaugcuggaguuguuuggacacuuaaugauguuaaagacaaugaugguagaccuguucauguuaaagagauuacaaaggaaaauguugaaacuuugacauggccucuuauccuuaauugugaacguguuguuaaacuucaaaauaaugaaauuaugccugguaaacuuaagcaaaaaccuaugaaagcugagggugauggugguguuuuaggugaugguaaugccuuguauaauacugagggugguaaaacuuuuauguacgcuuauauuucuaauaaagcugaccuuaaauuuguuaagugggaguaugagggugguugcaacacaaucgaguuagacucuccuugucgauuuauggucgaaacaccuaaugguccucaagugaaguauuuguauuuuguuaaaaauuuaaauaccuuacguagaggugccguucuugguuuuauaggugccacaauucgucuacaagcugguaaacaaacugaauuggcuguuaauucuggacuuuuaacugcuugugcuuuuucuguugauccagcaacuacuuacuuggaagcuguuaaacauggugcaaaaccuguaaguaauuguauuaagauguuaucuaauggugcugguaauggucaagcuauaacaacuaguguagaugcuaacaccaaucaagauucuuaugguggagcgucuauuuguuuguauugucgggcccacguuccucacccuaguauggaugguuacuguaaguuuaaggguaaauguguucagguuccuauugguuguuuggauccuauuagguuuuguuuagaaaauaauguguguaauguuugugguuguugguugggacacgggugugcuugugaccguacaacuauucaaaguguugacauuucuuauuuaaacgagcaagggguucuagugcagcucgacuagaacccugcaauggcacggacaucgauaaguguguucgugcuuuugacauuuauaauaaaaauguuucauucuuggguaaguguuugaagaugaacuguguucguuuuaaaaaugcugaucuuaaggaugguuauuuuguuauaaagagguguacuaagucgguuauggaacacgagcaauccauguauaaccuacuuaacuuuucuggugcuuuggcugagcaugauuucuuuacuuggaaagauggcagagucauuuaugguaauguuaguagacauaaucuuacuaaauauacuaugauggacuuggucuaugcuaugcguaacuuugaugaacaaaauugugauguucuaaaagaaguauuaguuuuaacugguuguugugacaauucuuauuuugauaguaaggguugguaugacccaguugaaaaugaagauauacauagaguuuaugcaucucuuggcaaaauuguagcuagagcuaugcuuaaaugcguugcucuaugcgaugcgaugguugcuaaagguguuguugguguuuuaacauuagauaaccaagaucuuaaugguaacuuuuaugauuuuggugauuuuguuguuagcuuaccuaauauggguguucccuguuguacaucauauuauucuuauaugaugccuauuauggguuuaacuaauuguuuagcuagugaguguuuugucaagagugauauuuuugguagugauuuuaaaacuuuugauuugcuuaaguaugauuucacugaacauaaagaaaauuuauucaauaaguacuuuaagcauuggaguuuugauuaucauccuaauuguagugacuguuaugaugauauguguguuauacauugugcuaauuuuaauacacuauuugccacaacuauaccagguacugcuuuugguccacuaugucguaaaguuuuuauagaugguguuccacuuguuacaacugcugguuaucauuuuaagcaauuagguuugguuuggaauaaagauguuaacacacacucaguuagguugacaauuacugaacuuuugcaauuugucaccgacccuuccuugauaauagcuucuuccccagcacucguugaucaacgcacuauuuguuuuucuguugcagcauugaguacugguuugacaaaucaaguuguuaagccaggucauuuuaaugaagaguuuuauaacuuucuucguuuaagagguuucuuugaugaagguucugaacuuacauuaaaacauuucuucuucgcacagaauggugaugcugcuguuaaagauuuugacuuuuaccguuauaauaagccuaccauuuuagauauuugucaagcuagaguuacauauaagauagucucucguuauuuugacauuuaugaagguggcuguauuaaggcaugugaaguuguuguaacaaaucuuaauaagagugcugguuggccauuaaauaaguuugguaaagcuaguuuguauuaugaaucuauaucuuaugaagaacaggaugcuuuguuugcuuugacaaagcguaauguccucccuacuaugacacagcugaaucuuaaguaugcuauuagugguaaagaacgugcuagaacuguuggugguguuucucuguugucuacaaugaccacaagacaauaccaucaaaaacaucuuaaauccauuguuaauacacgcaaugccacuguuguuauugguacuaccaaauuuuauggugguuggaauaauauguugcguacuuuaauugaugguguugaaaacccuaugcuuauggguugggauuaucccaaaugugauagagcuuugccuaacaugauacguaugauuucagccaugguguugggcucuaagcauguuaauuguuguacugcaacagauagguuuuauaggcuugguaaugaguuggcacaaguuuuaacagaaguuguuuauucuaauggugguuuuuauuuuaagccaggugguacgacuucuggugacgcuaguacagcuuaugcuaauucuauuuuuaacauuuuucaagccgugaguucuaacauuaacagguugcuuagugucccaucagauucauguaauaauguuaauguuagggaucuacaacgacgucuguaugauaauuguuauagguuaacuaguguugaagagucauucauugaugauuauuaugguuaucuuaggaaacauuuuucaaugaugauucucucugaugacgguguugucuguuauaacaaggauuaugcugaguuagguuauauagcagacauuagugcuuuuaaagccacuuuguauuaccagaauaaugucuuuaugaguacuucuaaauguuggguugaagaagauuuaacuaagggaccacaugaguuuuguucccagcauacuaugcaaauaguugacaaagaugguaccuauuauuugccuuacccagauccuaguaggaucuugucagcugguguuuuuguugaugauguuguuaagacagaugcuguuguuuuguuagaacguuaugugucuuuagcuauugaugcauacccucuuucaaaacacccuaauuccgaauaucguaagguuuuuuacguauuacuugauuggguuaagcaucuuaacaaaaauuugaaugaggguguucuugaaucuuuuucuguuacacuucuugauaaucaagaagauaaguuuuggugugaagauuuuuaugcuaguauguaugaaaauucuacaauauugcaagcugcugguuuauguguuguuugugguucacaaacuguacuucguuguggugauugucugcguaagccuauguugugcacuaaaugcgcauaugaucauguauuugguaccgaccacaaguuuauuuuggcuauaacaccguauguauguaaugcaucagguugugguguuagugaugucaaaaaauuguaucuuggugguuugaauuacuauuguacaaaucauaaaccacaguugucuuuuccauuauguucagcugguaauauauuugguuuauauaaaaauucagcaacugguuccuuagauguugaaguuuuuaauaggcuugcaacgucugauuggacugauguuagggacuauaaacuugcuaaugauguuaaagauacacuuagacucuuugcggcugaaacuauuaaagcuaaagaagagaguguuaagucuucuuaugcuuuugcaacucuuaaagagguuguuggaccuaaagaauugcuucuuaguugggaaagugguaaaguuaaaccaccuuugaaucguaauucuguuuucacuuguuuucaaauaaguaaggacucaaaauuccaaauaggugaguucaucuuugagaagguugaauaugguucugauacuguuacguauaagucuacuguaacuacuaaguuaguuccugguaugauuuuugucuuaacaucucacaauguccaaccuuuacgugcaccaacuauugcaaaccaagagaaguauucuagcauuuauaaauugcacccugcuuuuaaugucagugaugcauaugcuaauuugguuccauauuaccaacuuauugguaaacaaaagauaacuacaauacaggguccuccugguagugguaagucacauuguuccauuggacuuggauuguacuacccaggugcgcguauuguuuuuguugcuugugcccaugcugcuguugauuccuuaugugcaaaagcuaugacuguuuauagcauugauaaguguacuaggauuauaccugcaagagcucggguugaguguuauaguggcuuuaaaccaaauaacacuagugcacaauacauauuuagcacuguuaacgcauuaccugaguguaaugcugauaucguuguuguagaugaaguuucaauguguacaaauuaugaccuuucuguuauuaaccagcguuuaucauauaaacauauuguuuauguuggugauccacaacaacuuccugcaccuagaguaaugauuacuaaagguguuauggagccuguugauuauaacguuguuacucaacguaugugugcuauaggcccugauguuuuucuucauaaauguuauagauguccugcugaaauaguuaauacaguuucugaacuuguuuaugagaacaaguuugucccuguuaaaccugcuaguaaacaguguuuuaaagucuuuuuuaaggguaauguacagguugacaaugguucuaguauuaacagaaagcagcuugaaauaguuaagcuguuuuuaguuaaaaauccaaguuggaguaaggcuguguuuauuucuccuuauaauagucagaauuauguugcuaguagauuuuuaggacuucaaauucaaacuguugauucuucucaagguagugaguaugauuauguaaucuaugcacaaacuucugacacugcacaugcuugcaauguaaaccguuuuaauguugcuauaacacgugcuaagaaggguauauuuuguguaaugugugauaaaacuuuguuugauucacuuaaguuuuuugagauuaaacaugcagauuuacacucuagccagguuuguggcuuguuuaaaaauuguacacgcacuccucuuaauuuaccaccaacucaugcacacacuuucuugucguugucagaucaguuuaagacuacaggugauuuagcuguucaaauagguucaaauaacguuuguacuuaugaacauguuauaucauuuauggguuuuagguuugauauuaguauuccugguagucauaguuuguuuuguacacgugacuuugcuauucguaaugugcgugguugguuggguauggauguugaaagugcucauguuuguggcgauaacauagguacuaauguuccuuuacagguugguuuuucaaaugguguuaauuuuguugugcaaacugaagguugugugucuaccaauuuuggugauguuauuaaaccuguuugugcaaaaucuccaccaggugaacaauuuagacaccuuauuccucuuuuacguaaaggacaaccuugguuaauuguucguagacgcauugugcaaaugauaucugauuauuuguccaauuugucugacauucuugucuuuguuuugugggcagguaguuuggaauuaacuacaaugcguuacuuuguaaaaauagggccaauuaaauauuguuauugugguaauucugccacuuguuauaauucaguuaguaaugaauauuguuguuuuaaacaugcauuggguugugauuauguuuacaauccguaugcuuuugauauacaacagugggguuauguugguuccuugagccaaaaccaccacacauucuguaacauucauagaaacgagcaugaugccucuggugaugcuguuaugacacguuguuuggcaguacaugauuguuuugucaaaaauguugauuggacuguaacguaccccuuuauugcaaaugagaaauuuaucaauggcugugggcguaauguccagggacauguuguucgugcagccuugaaauuguauaaaccuaguguuauucaugacauugguaauccuaaagguguacguugugcuguuacugaugccaaaugguacuguuaugacaagcaaccuguuaauaguaaugucaaguuguuggauuaugauuaugcaacccauggucaacuugauggucuuuguuuauucuggaauuguaauguugauauguauccagaauuuucaauugugugucguuuugacacacguacucguucuguuuuuaauuuagaagguguuaauggugguucucuuuauguuaacaaacaugcguuucauacaccagcauaugauaaacgugcuuuuguuaaauuaaaaccuaugcccuuuuuuuacuuugaugacagugauugugauguugugcaagaacaaguuaauuauguaccccuucgcgcuaguaguuguguuacucguuguaauauagguggugcuguuuguucaaaacaugcaaauuuguaucaaaaauauguugaggcauauaauacauuuacacaggcagguuuuaacauuuggguaccacauaguuuugauguuuauaauuuguggcaaauuuuuauugaaacuaauuuacaaagucuugaaaauauagcauuuaauguuguaaaaaaaggguguuuuacugguguugauggugaguuaccuguugcaguuguuaacgacaaaguuuuuguucgcuauggcgauguugacaacuugguuuuuacaaauaaaacaacauugccuacuaauguugcuuuugaauuguuugcaaaacgaaaaauggguuuaacaccaccauugucuauucucaaaaaucucgguguuguugcuacauauaaauuuguuuuaugggauuaugaagcugaaagaccuuuuaccucauauacuaagaguguauguaaauacacugauuuuaaugaggauguuuguguuuguuuugacaauaguauucaggguucguaugagcguuuuacgcuuacuacgaacgcuguuuuauuuucuacuguugucauuaaaaauuuaacaccuauaaaguugaauuuugguauguugaaugguaugccaguuucuucuauuaagggugauaaagguguugaaaaauuaguuaauugguacauauauguucguaaaaauggucaauuucaagaucacuaugaugguuuuuacacucaagguaggaauuuaucagacuuuacaccaagaagugauauggaguaugauuuucuuaacauggauauggguguuuuuauuaauaaauauggucuugaggauuuuaauuuugaacauguuguauauggugauguuucaaaaacuacauuaggaggucuucauuuguugauaucacaguuuaggcuuaguaaaauggguguuuugaaagcugaugauuuugucacugcuucugacacaacuuugaggugcuguacuguuacuuaucuuaaugaacuuaguucaaaaguuguuuguacuuauauggauuuguuguuggacgacuuuguuacuauacuaaagaguuuagaucuugguguaauaucuaaaguucaugaaguuauuauagauaauaaaccuuauagguggauguugugguguaaagauaaccacuuguccacuuuuuauccacaguugcagucugcugaauggaagugugguuaugcuaugccacaaauuuauaagcuucaacguauguguuuggaaccuuguaauuuauauaauuauggugcugguauuaaguugccuagugguauaauguuaaauguuguuaaauacacucagcuuugucaauaccuaaauagcacuacaaugugcguaccucauaauaugcguguuuugcacuauggugcugguucugacaaagguguggcaccugguacaacuguuuuaaaacguuggcuaccacccgaugcaauaaucauugauaaugauaucaaugauuauguuagugaugcagauuuuagcauuacaggugauugugcuacuguuuaucuugaagauaaguuugacuuacuuauuucugauauguaugaugguagaauuaaauuuugugauggugaaaaugucucuaaagauggguuuuuuacuuaucuuaaugguguuauuagagaaaaauuagcuauuggugguaguguugccauuaagauuacagaauauaguuggaauaaguaucuuuaugaauuaauacaaagauuugcuuuuuggacuuuguuuugcacgucuguuaauacauccucuucagaagcuuuucuuauugguauuaauuauuuaggugacuuuauucaagguccuuuuauagcugguaacacuguucaugcuaauuauauauuuuggcguaauucuacuauuaugucuuugucauacaauucaguuuuagauuuaaguaaguuugaauguaaacauaaagccacuguuguuguuacacuuaaagauagugauguaaaugauaugguuuugaguuugauuaagagugguagguuguuguuacgcaauaauggucguuuuggugguuuuaguaaucauuuagucucaacuaaaugaaacuuuucuugauuuugcuuguuuugccccuggccucuugcuuuuucacauguaauaguaaugcuaaucucucuauguuacaauuagguguuccugacaauucuucaacuauuguuacggguuuauugccaacucauugguuuugugcuaaucagaguacaucuguuuacucagccaaugguuucuuuuauauugauguugguaaucaccguagugcuuuugcgcuccauacugguuauuaugaugcuaaucaguauuauauuuauguuacuaaugaaauaggcuuaaaugcuucuguuacucuuaagauuuguaaguuuaguagaaacacuacuuuugauuuuuuaaguaaugcuucuaguucuuuugacuguauaguuaauuuguuauuuacagaacaguuaggugcgccuuugggcauaacuauaucuggugaaacugugcgucugcauuuauauaauguaacucguacuuuuuaugugccagcagcuuauaaacuuacuaaacuuaguguuaaauguuacuuuaacuauuccuguguuuuuaguguugucaacgccaccguuacugugaaugucaccacacauaauggccguguaguuaacuacacuguuugugaugauuguaaugguuauacugauaacauauuuucuguucaacaggauggccgcauuccuaaugguuucccuuuuaauaauugguuuuuguuaacuaaugguuccacacuaguggacggggucucuagacuuuaucaaccacuccguuuaacuuguuuauggccuguaccuggucuuaaaucuucaacugguuuuguuuauuuuaaugccacugguucugauguuaauuguaacggcuaucaacauaauucuguuguugauguuaugcguuacaaucuuaacuucagugcuaauucuuuggacaaucucaagagugguguuauaguuuuuaaaacuuuacaguacgauguuuuguuuuauuguaguaauucuuccucagguguucuugacaccacaauaccuuuuggcccguccucucaaccuuauuacuguuuuauaaacagcacuaucaacacuacucauguuagcacuuuuguggguauuuuaccacccacugugcgugaaauuguuguugcuagaacuggccaguuuuauauuaaugguuuuaaguauuucgauuuggguuucauagaagcugucaauuuuaaugucacgacugcuagcgccacagauuuuuggacgguugcauuugcuacuuuuguugauguuuugguuaauguuagugcaacuaacauucaaaacuuacuuuauugcgauucuccauuugaaaaguugcagugugagcacuugcaguuuggauugcaggaugguuuuuauucugcaaauuuucuugaugauaauguuuugccugagacuuauguugcacuccccauuuauuaucaacacacggacauaaauuuuacugcaacugcaucuuuuggugguucuuguuauguuuguaaaccacaccagguuaauauaucucuuaaugguaacacuucaguguguguuagaacaucucauuuuucaauuagguauauuuauaaccgcguuaagagugguucaccaggugacucuucauggcacauuuauuuaaagaguggcacuuguccauuuucuuuuucuaaguuaaauaauuuucaaaaguucaagacuauuuguuucucaaccgucgaagugccugguaguuguaauuuuccgcuugaagccaccuggcauuacacuucuuauacuauuguuggugcuuuguauguuacuuggucugaagguaauucuauuacugguguaccuuauccugucucugguauucgugaguuuaguaauuuaguuuuaaauaauuguaccaaauauaauauuuaugauuauguugguacuggaauuauacguucuucaaaccagucacuugcuggugguauuacauauguuucuaacucugguaauuuacuugguuuuaaaaauguuuccacugguaacauuuuuauugugacaccauguaaccaaccagaccaaguagcuguuuaucaacaaagcauuauuggugccaugaccgcuguuaaugagucuagauauggcuugcaaaacuuacuacaguuaccuaacuuuuauuauguuaguaauggugguaacaauugcacuacggccguuaugacuuauucuaauuuugguauuugugcugaugguucuuugauuccuguucguccgcguaauucuagugauaaugguauuucagccauaaucacugcuaauuuauccauuccuucuaacuggacuacuucaguucaaguugaguaccuccaaauuacuaguacuccaauaguuguugauugugcuacuuauguguguaaugguaacccucgcuguaagaaucuacuuaagcaguauacuucugcuuguaaaacuauugaagaugccuuacgacuuagugcucauuuggaaacuaaugauguuaguaguaugcuaacuuucgauagcaaugcuuuuaguuuggcuaauguuacuaguuuuggagauuauaaccuuucuaguguuuuaccucagagaaacauucguucaagccguauagcaggacguagugcuuuggaagauuuguuguuuagcaaaguuguuacaucugguuuggguacuguugauguugacuauaagucuuguacuaaaggucuuucuauugcugaccuugcuugugcucaguacuacaauggcauaaugguuuugccagguguugcugaugcugaacguauggccauguacacagguucucuuauagguggcauggugcucggaggucuuacaucagcagccgccauaccuuuuucuuuggcacugcaagcacgacuuaacuauguugcuuuacaaacugaugugcuucaagaaaaucagaaaauuuuggcugcaucauuuaauaaggcuauuaauaauauuguugcuucuuuuaguagcguuaaugaugcuauuacacaaacugcagaggcuauacauacuguuacuauugcacuuaauaagauucaggauguuguuaaucaacaggguagugcucuuaaccaucucacuucacaauugagacauaauuuucaggccauuucuaauucaauucaggcuauuuaugaccggcuugauucaauucaagccgaucaacaaguugacagauuaauuacuggacggcuugcagcuuugaaugcauuuguuucccaaguuuugaauaaauauacugaaguucgugguucaagacgcuuagcacagcagaagauuaaugaaugugucaagucacaaucuaauagauaugguuuuuguggcaauggcacucacaucuuuucaaucgucaacucagcuccagaugguuugcuuuuucuucauacuguuuugcugccaacugauuacaagaauguaaaggcguggucugguaucuguguugauggcauuuauggcuauguucugcgucaaccuaacuugguucuuuauucugauaauggugucuuucguguaacuuccagggucauguuucaaccucgcuuaccuguuuugucugauuuugugcaaauauauaauuguaauguuacuuuuguuaacauaucucguguugaguuacauacugucauaccugacuacguugauguuaauaaaacauuacaagaguuugcacaaaacuuaccaaaguauguuaagccuaauuuugacuugacuccuuuuaauuuaacauaucuuaauuugaguucugaguugaagcaacucgaagcuaaaacugcuagucuuuuucaaacuacuguugaauuacaaggucuuauugaucagauuaacaguacauauguugauuugaaguugcuuaauagguuugaaaauuauaucaaauggccuugguggguuuggcucauuauuucuguuguuuuuguuguauuguugagucuucuuguguuuuguugucuuucuacagguuguugugguuguugcaauuguuuaacuucaucaaugcgaggcuguugugauugugguucaacuaaacuuccuuauuacgaauuugaaaagguccacguucaauaaugccuuuugguggccuauuucaacuuacucuugaaaguacuauuaauaagaguguggcuaaucucaaauuaccaccucaugauguuacugucuugcgugacaaucuuaaaccuguuacuacacuuaguacuauuacugcuuauuuguuaguuaguuuguuugucacuuacuuugcuuuauucaaaccucuuacugcuagaggucguguugcuuguuuuguuuuaaaacuauugacacuauuugucuaugugccuuuauugguucuuuuugguauguaucuugacaguuuuauaauuuuuucuacgcuguuguuucgauucauacauguuggcuauuaugccuaucucuauaaaaauuuuucauuuguuuuguucaauguuacuaaacuaugcuucguuucaggcaaguguugguaucuugaacaaucauuuuaugaaaaucguuuugcugcuauuuaugguggugaccacuaugucguuuuagguggugaaacuauuacuuuuguuucuuuugaugaccuuuauguugcuauuagagguucuugugaaaagaaccuacaacuuaugcguaagguugacuuguauaauggugcugucauuuacauuuuugccgaagagccuguuguugguauagucuacucuucucaacuauacgaagauguuccuucgauuaauugaugacaaugguauuguccucaauuccauuuuauggcuccuuguuaugauauuuuucuuuguguuggcaaugaccuuuauuaaacugauucaauuguguuuuacuugucauuauuuuuuuaguaggacauuauaucaaccaguuuauaaaauuuuucuugcuuaccaagauuauaugcaaauagcaccuguuccagcugaaguacuaaaugucuaaacuaaacgaugucuaauaguagugugccucuuuuagagguuuauguccauuuacguaacuggaacuuuaguuggaauuuaauucuaacgcuuuuuauaguuguguugcaguaugggcauuauaaguauagcagacuucuuuaugguuuaaagaugucuguuuuaugguguuuauggccacuuguucuagcuuugucuauuuuugacuguuuugucaauuuuaauguggacugggucuuuuuugguuuuaguauucuuaugucuauuauuacacuuuguuuauggguuauguauuuuguuaauaguuucagacuuuggcgccguguuaaaacuuuuugggcuuuuaauccugaaacuaaugcaaucaucucucuccagguuuacggacauaauuauuacuuaccggugauggcugcaccuacagguguuacauuaacacuucuuagugguguacuucuuguugauggccauaagauugcuacucguguucaagugggucaguugccuaaauauguaauaguugcuacgccuaguaccacaauuguuugugaccguguuggucgcucuguuaaugaaacaagccagacugguugggcauucuacguccgugcuaaacauggugauuuuucugguguugccucucaggaggguguuuugucagaaagagagaaguugcuucauuuaaucuaaacuaaacaaaauggcuaguguaaauugggccgaugacagagcugcuaggaagaaauuuccuccuccuucauuuuacaugccucuuuugguuaguucugauaaggcaccauauagggucauucccaggaaucuugucccuauugguaaggguaauaaagaugagcagauugguuauuggaauguucaagagcguuggcguaugcgcagggggcaacguguugauuugccuccuaaaguucauuuuuauuaccuagguacuggaccucauaaggaccuuaaauucagacaacguucugaugguguuguuuggguugcuaaggaaggugcuaaaacuguuaauaccagucuugguaaucgcaaacguaaucagaaaccuuuggaaccaaaguucucuauugcuuugccuccagagcucucuguuguugaguuugaggaucgcucuaauaacucaucucgugcuagcagucguucuucaacucguaacaacucacgagacucuucucguagcacuucaagacaacagucucgcacucguucugauucuaaccagucuucuucagaucuuguugcugcuguuacuuuggcuuuaaagaacuuagguuuugauaaccagucgaagucaccuaguucuucugguacuuccacuccuaagaaaccuaauaagccucuuucucaacccagggcugauaagccuucucaguugaagaaaccucguuggaagcguguuccuaccagagaggaaaauguuauucagugcuuugguccucgugauuuuaaucacaauaugggggauucagaucuuguucagaaugguguugaugccaaagguuuuccacagcuugcugaauugauuccuaaucaggcugcguuauucuuugauagugagguuagcacugaugaagugggugauaauguucagauuaccuacaccuacaaaaugcuuguagcuaaggauaauaagaaccuuccuaaguucauugagcagauuagugcuuuuacuaaacccaguucuaucaaagaaaugcagucacaaucaucucauguugcucagaacacaguacuuaaugcuucuauuccagaaucuaaaccauuggcugaugaugauucagccauuauagaaauugucaacgagguuuugcauuaaauuguuuuguaauuccaguugaauguuuauuauuauuaguugcaaccccaugcguuuagcgcaugauaaggguuuagucuuacacacaaugguaggccagugauaguaaaguguaaguaauuugcuaucauauuaacaugucuagaggaaagucagaacuuuuucuguuuguguuguuggaguacuuaaagaucgcauaggcgcgccaacaauggaagagccaacaacauaucuaaaaauguuuugucugguacuuguuaaugauauuguuuuugauauggauacac

SEQ ID NO: 16 - RNA, 27553 nt, Human coronavirus NL63
guguauccauaucaaaaacaauaucauuaacaaguaccagacaaaacauuuuuagauauguuguuggcucuuccauuguuggcgcgccuaugcgaucuuuaaguacuccaacaacacaaacagaaaaaguucugacuuuccucuagacauguuaauaugauagcaaauuacuuacacuuuacuaucacuggccuaccauuguguguaagacuaaacccuuaucaugcgcuaaacgcaugggguugcaacuaauaauaauaaacauucaacuggaauuacaaaacaauuuaaugcaaaaccucguugacaauuucuauaauggcugaaucaucaucagccaaugguuuagauucuggaauagaagcauuaaguacuguguucugagcaacaugagaugauugugacugcauuucuuugauagaacuggguuuaguaaaagcacuaaucugcucaaugaacuuaggaagguucuuauuauccuuagcuacaagcauuuuguagguguagguaaucugaacauuaucacccacuucaucagugcuaaccucacuaucaaagaauaacgcagccugauuaggaaucaauucagcaagcuguggaaaaccuuuggcaucaacaccauucugaacaagaucugaaucccccauauugugauuaaaaucacgaggaccaaagcacugaauaacauuuuccucucugguaggaacacgcuuccaacgagguuucuucaacugagaaggcuuaucagcccuggguugagaaagaggcuuauuagguuucuuaggaguggaaguaccagaagaacuaggugacuucgacugguuaucaaaaccuaaguucuuuaaagccaaaguaacagcagcaacaagaucugaagaagacugguuagaaucagaacgagugcgagacuguugucuugaagugcuacgagaagagucucgugaguuguuacgaguugaagaacgacugcuagcacgagaugaguuauuagagcgauccucaaacucaacaacagagagcucuggaggcaaagcaauagagaacuuugguuccaaagguuucugauuacguuugcgauuaccaagacugguauuaacaguuuuagcaccuuccuuagcaacccaaacaacaccaucagaacguugucugaauuuaagguccuuaugagguccaguaccuagguaauaaaaaugaacuuuaggaggcaaaucaacacguugcccccugcgcauacgccaacgcucuugaacauuccaauaaccaaucugcucaucuuuauuacccuuaccaauagggacaagauuccugggaaugacccuauauggugccuuaucagaacuaaccaaaagaggcauguaaaaugaaggaggaggaaauuucuuccuagcagcucugucaucggcccaauuuacacuagccauuuuguuuaguuuagauuaaaugaagcaacuucucucuuucugacaaaacacccuccugagaggcaacaccagaaaaaucaccauguuuagcacggacguagaaugcccaaccagucuggcuuguuucauuaacagagcgaccaacacggucacaaacaauugugguacuaggcguagcaacuauuacauauuuaggcaacugacccacuugaacacgaguagcaaucuuauggccaucaacaagaaguacaccacuaagaaguguuaauguaacaccuguaggugcagccaucaccgguaaguaauaauuauguccguaaaccuggagagagaugauugcauuaguuucaggauuaaaagcccaaaaaguuuuaacacggcgccaaagucugaaacuauuaacaaaauacauaacccauaaacaaaguguaauaauagacauaagaauacuaaaaccaaaaaagacccaguccacauuaaaauugacaaaacagucaaaaauagacaaagcuagaacaaguggccauaaacaccauaaaacagacaucuuuaaaccauaaagaagucugcuauacuuauaaugcccauacugcaacacaacuauaaaaagcguuagaauuaaauuccaacuaaaguuccaguuacguaaauggacauaaaccucuaaaagaggcacacuacuauuagacaucguuuaguuuagacauuuaguacuucagcuggaacaggugcuauuugcauauaaucuugguaagcaagaaaaauuuuauaaacugguugauauaauguccuacuaaaaaaauaaugacaaguaaaacacaauugaaucaguuuaauaaaggucauugccaacacaaagaaaaauaucauaacaaggagccauaaaauggaauugaggacaauaccauugucaucaauuaaucgaaggaacaucuucguauaguugagaagaguagacuauaccaacaacaggcucuucggcaaaaauguaaaugacagcaccauuauacaagucaaccuuacgcauaaguuguagguucuuuucacaagaaccucuaauagcaacauaaaggucaucaaaagaaacaaaaguaauaguuucaccaccuaaaacgacauaguggucaccaccauaaauagcagcaaaacgauuuucauaaaaugauuguucaagauaccaacacuugccugaaacgaagcauaguuuaguaacauugaacaaaacaaaugaaaaauuuuuauagagauaggcauaauagccaacauguaugaaucgaaacaacagcguagaaaaaauuauaaaacugucaagauacauaccaaaaagaaccaauaaaggcacauagacaaauagugucaauaguuuuaaaacaaaacaagcaacacgaccucuagcaguaagagguuugaauaaagcaaaguaagugacaaacaaacuaacuaacaaauaagcaguaauaguacuaaguguaguaacagguuuaagauugucacgcaagacaguaacaucaugaggugguaauuugagauuagccacacucuuauuaauaguacuuucaagaguaaguugaaauaggccaccaaaaggcauuauugaacguggaccuuuucaaauucguaauaaggaaguuuaguugaaccacaaucacaacagccucgcauugaugaaguuaaacaauugcaacaaccacaacaaccuguagaaagacaacaaaacacaagaagacucaacaauacaacaaaaacaacagaaauaaugagccaaacccaccaaggccauuugauauaauuuucaaaccuauuaagcaacuucaaaucaacauauguacuguuaaucugaucaauaagaccuuguaauucaacaguaguuugaaaaagacuagcaguuuuagcuucgaguugcuucaacucagaacucaaauuaagauauguuaaauuaaaaggagucaagucaaaauuaggcuuaacauacuuugguaaguuuugugcaaacucuuguaauguuuuauuaacaucaacguagucagguaugacaguauguaacucaacacgagauauguuaacaaaaguaacauuacaauuauauauuugcacaaaaucagacaaaacagguaagcgagguugaaacaugacccuggaaguuacacgaaagacaccauuaucagaauaaagaaccaaguuagguugacgcagaacauagccauaaaugccaucaacacagauaccagaccacgccuuuacauucuuguaaucaguuggcagcaaaacaguaugaagaaaaagcaaaccaucuggagcugaguugacgauugaaaagaugugagugccauugccacaaaaaccauaucuauuagauugugacuugacacauucauuaaucuucugcugugcuaagcgucuugaaccacgaacuucaguauauuuauucaaaacuugggaaacaaaugcauucaaagcugcaagccguccaguaauuaaucugucaacuuguugaucggcuugaauugaaucaagccggucauaaauagccugaauugaauuagaaauggccugaaaauuaugucucaauugugaagugagaugguuaagagcacuacccuguugauuaacaacauccugaaucuuauuaagugcaauaguaacaguauguauagccucugcaguuuguguaauagcaucauuaacgcuacuaaaagaagcaacaauauuauuaauagccuuauuaaaugaugcagccaaaauuuucugauuuucuugaagcacaucaguuuguaaagcaacauaguuaagucgugcuugcagugccaaagaaaaagguauggcggcugcugauguaagaccuccgagcaccaugccaccuauaagagaaccuguguacauggccauacguucagcaucagcaacaccuggcaaaaccauuaugccauuguaguacugagcacaagcaaggucagcaauagaaagaccuuuaguacaagacuuauagucaacaucaacaguacccaaaccagauguaacaacuuugcuaaacaacaaaucuuccaaagcacuacguccugcuauacggcuugaacgaauguuucucugagguaaaacacuagaaagguuauaaucuccaaaacuaguaacauuagccaaacuaaaagcauugcuaucgaaaguuagcauacuacuaacaucauuaguuuccaaaugagcacuaagucguaaggcaucuucaauaguuuuacaagcagaaguauacugcuuaaguagauucuuacagcgaggguuaccauuacacacauaaguagcacaaucaacaacuauuggaguacuaguaauuuggagguacucaacuugaacugaaguaguccaguuagaaggaauggauaaauuagcagugauuauggcugaaauaccauuaucacuagaauuacgcggacgaacaggaaucaaagaaccaucagcacaaauaccaaaauuagaauaagucauaacggccguagugcaauuguuaccaccauuacuaacauaauaaaaguuagguaacuguaguaaguuuugcaagccauaucuagacucauuaacagcggucauggcaccaauaaugcuuuguugauaaacagcuacuuggucugguugguuacauggugucacaauaaaaauguuaccaguggaaacauuuuuaaaaccaaguaaauuaccagaguuagaaacauauguaauaccaccagcaagugacugguuugaagaacguauaauuccaguaccaacauaaucauaaauauuauauuugguacaauuauuuaaaacuaaauuacuaaacucacgaauaccagagacaggauaagguacaccaguaauagaauuaccuucagaccaaguaacauacaaagcaccaacaauaguauaagaaguguaaugccagguggcuucaagcggaaaauuacaacuaccaggcacuucgacgguugagaaacaaauagucuugaacuuuugaaaauuauuuaacuuagaaaaagaaaauggacaagugccacucuuuaaauaaaugugccaugaagagucaccuggugaaccacucuuaacgcgguuauaaauauaccuaauugaaaaaugagauguucuaacacacacugaaguguuaccauuaagagauauauuaaccuggugugguuuacaaacauaacaagaaccaccaaaagaugcaguugcaguaaaauuuauguccguguguugauaauaaauggggagugcaacauaagucucaggcaaaacauuaucaucaagaaaauuugcagaauaaaaaccauccugcaauccaaacugcaagugcucacacugcaacuuuucaaauggagaaucgcaauaaaguaaguuuugaauguuaguugcacuaacauuaaccaaaacaucaacaaaaguagcaaaugcaaccguccaaaaaucuguggcgcuagcagucgugacauuaaaauugacagcuucuaugaaacccaaaucgaaauacuuaaaaccauuaauauaaaacuggccaguucuagcaacaacaauuucacgcacagugggugguaaaauacccacaaaagugcuaacaugaguaguguugauagugcuguuuauaaaacaguaauaagguugagaggacgggccaaaagguauuguggugucaagaacaccugaggaagaauuacuacaauaaaacaaaacaucguacuguaaaguuuuaaaaacuauaacaccacucuugagauuguccaaagaauuagcacugaaguuaagauuguaacgcauaacaucaacaacagaauuauguugauagccguuacaauuaacaucagaaccaguggcauuaaaauaaacaaaaccaguugaagauuuaagaccagguacaggccauaaacaaguuaaacggagugguugauaaagucuagagaccccguccacuaguguggaaccauuaguuaacaaaaaccaauuauuaaaagggaaaccauuaggaaugcggccauccuguugaacagaaaauauguuaucaguauaaccauuacaaucaucacaaacaguguaguuaacuacacggccauuauguguggugacauucacaguaacgguggcguugacaacacuaaaaacacaggaauaguuaaaguaacauuuaacacuaaguuuaguaaguuuauaagcugcuggcacauaaaaaguacgaguuacauuauauaaaugcagacgcacaguuucaccagauauaguuaugcccaaaggcgcaccuaacuguucuguaaauaacaaauuaacuauacagucaaaagaacuagaagcauuacuuaaaaaaucaaaaguaguguuucuacuaaacuuacaaaucuuaagaguaacagaagcauuuaagccuauuucauuaguaacauaaauauaauacugauuagcaucauaauaaccaguauggagcgcaaaagcacuacggugauuaccaacaucaauauaaaagaaaccauuggcugaguaaacagauguacucugauuagcacaaaaccaaugaguuggcaauaaacccguaacaauaguugaagaauugucaggaacaccuaauuguaacauagagagauuagcauuacuauuacaugugaaaaagcaagaggccaggggcaaaacaagcaaaaucaagaaaaguuucauuuaguugagacuaaaugauuacuaaaaccaccaaaacgaccauuauugcguaacaacaaccuaccacucuuaaucaaacucaaaaccauaucauuuacaucacuaucuuuaaguguaacaacaacaguggcuuuauguuuacauucaaacuuacuuaaaucuaaaacugaauuguaugacaaagacauaauaguagaauuacgccaaaauauauaauuagcaugaacaguguuaccagcuauaaaaggaccuugaauaaagucaccuaaauaauuaauaccaauaagaaaagcuucugaagaggauguauuaacagacgugcaaaacaaaguccaaaaagcaaaucuuuguauuaauucauaaagauacuuauuccaacuauauucuguaaucuuaauggcaacacuaccaccaauagcuaauuuuucucuaauaacaccauuaagauaaguaaaaaacccaucuuuagagacauuuucaccaucacaaaauuuaauucuaccaucauacauaucagaaauaaguaagucaaacuuaucuucaagauaaacaguagcacaaucaccuguaaugcuaaaaucugcaucacuaacauaaucauugauaucauuaucaaugauuauugcaucgggugguagccaacguuuuaaaacaguuguaccaggugccacaccuuugucagaaccagcaccauagugcaaaacacgcauauuaugagguacgcacauuguagugcuauuuagguauugacaaagcugaguguauuuaacaacauuuaacauuauaccacuaggcaacuuaauaccagcaccauaauuauauaaauuacaagguuccaaacacauacguugaagcuuauaaauuuguggcauagcauaaccacacuuccauucagcagacugcaacuguggauaaaaaguggacaagugguuaucuuuacaccacaacauccaccuauaagguuuauuaucuauaauaacuucaugaacuuuagauauuacaccaagaucuaaacucuuuaguauaguaacaaagucguccaacaacaaauccauauaaguacaaacaacuuuugaacuaaguucauuaagauaaguaacaguacagcaccucaaaguugugucagaagcagugacaaaaucaucagcuuucaaaacacccauuuuacuaagccuaaacugugauaucaacaaaugaagaccuccuaauguaguuuuugaaacaucaccauauacaacauguucaaaauuaaaauccucaagaccauauuuauuaauaaaaacacccauauccauguuaagaaaaucauacuccauaucacuucuugguguaaagucugauaaauuccuaccuugaguguaaaaaccaucauagugaucuugaaauugaccauuuuuacgaacauauauguaccaauuaacuaauuuuucaacaccuuuaucacccuuaauagaagaaacuggcauaccauucaacauaccaaaauucaacuuuauagguguuaaauuuuuaaugacaacaguagaaaauaaaacagcguucguaguaagcguaaaacgcucauacgaacccugaauacuauugucaaaacaaacacaaacauccucauuaaaaucaguguauuuacauacacucuuaguauaugagguaaaaggucuuucagcuucauaaucccauaaaacaaauuuauauguagcaacaacaccgagauuuuugagaauagacaauggugguguuaaacccauuuuucguuuugcaaacaauucaaaagcaacauuaguaggcaauguuguuuuauuuguaaaaaccaaguugucaacaucgccauagcgaacaaaaacuuugucguuaacaacugcaacagguaacucaccaucaacaccaguaaaacacccuuuuuuuacaacauuaaaugcuauauuuucaagacuuuguaaauuaguuucaauaaaaauuugccacaaauuauaaacaucaaaacuaugugguacccaaauguuaaaaccugccuguguaaauguauuauaugccucaacauauuuuugauacaaauuugcauguuuugaacaaacagcaccaccuauauuacaacgaguaacacaacuacuagcgcgaagggguacauaauuaacuuguucuugcacaacaucacaaucacugucaucaaaguaaaaaaagggcauagguuuuaauuuaacaaaagcacguuuaucauaugcugguguaugaaacgcauguuuguuaacauaaagagaaccaccauuaacaccuucuaaauuaaaaacagaacgaguacgugugucaaaacgacacacaauugaaaauucuggauacauaucaacauuacaauuccagaauaaacaaagaccaucaaguugaccauggguugcauaaucauaauccaacaacuugacauuacuauuaacagguugcuugucauaacaguaccauuuggcaucaguaacagcacaacguacaccuuuaggauuaccaaugucaugaauaacacuagguuuauacaauuucaaggcugcacgaacaacaugucccuggacauuacgcccacagccauugauaaauuucucauuugcaauaaagggguacguuacaguccaaucaacauuuuugacaaaacaaucauguacugccaaacaacgugucauaacagcaucaccagaggcaucaugcucguuucuaugaauguuacagaauguguggugguuuuggcucaaggaaccaacauaaccccacuguuguauaucaaaagcauacggauuguaaacauaaucacaacccaaugcauguuuaaaacaacaauauucauuacuaacugaauuauaacaaguggcagaauuaccacaauaacaauauuuaauuggcccuauuuuuacaaaguaacgcauuguaguuaauuccaaacuaccugcccacaaaacaaagacaagaaugucagacaaauuggacaaauaaucagauaucauuugcacaaugcgucuacgaacaauuaaccaagguuguccuuuacguaaaagaggaauaaggugucuaaauuguucaccugguggagauuuugcacaaacagguuuaauaacaucaccaaaauugguagacacacaaccuucaguuugcacaacaaaauuaacaccauuugaaaaaccaaccuguaaaggaacauuaguaccuauguuaucgccacaaacaugagcacuuucaacauccauacccaaccaaccacgcacauuacgaauagcaaagucacguguacaaaacaaacuaugacuaccaggaauacuaauaucaaaccuaaaacccauaaaugauauaacauguucauaaguacaaacguuauuugaaccuauuugaacagcuaaaucaccuguagucuuaaacugaucugacaacgacaagaaagugugugcaugaguuggugguaaauuaagaggagugcguguacaauuuuuaaacaagccacaaaccuggcuagaguguaaaucugcauguuuaaucucaaaaaacuuaagugaaucaaacaaaguuuuaucacacauuacacaaaauauacccuucuuagcacguguuauagcaacauuaaaacgguuuacauugcaagcaugugcagugucagaaguuugugcauagauuacauaaucauacucacuaccuugagaagaaucaacaguuugaauuugaaguccuaaaaaucuacuagcaacauaauucugacuauuauaaggagaaauaaacacagccuuacuccaacuuggauuuuuaacuaaaaacagcuuaacuauuucaagcugcuuucuguuaauacuagaaccauugucaaccuguacauuacccuuaaaaaagacuuuaaaacacuguuuacuagcagguuuaacagggacaaacuuguucucauaaacaaguucagaaacuguauuaacuauuucagcaggacaucuauaacauuuaugaagaaaaacaucagggccuauagcacacauacguugaguaacaacguuauaaucaacaggcuccauaacaccuuuaguaaucauuacucuaggugcaggaaguuguuguggaucaccaacauaaacaauauguuuauaugauaaacgcugguuaauaacagaaaggucauaauuuguacacauugaaacuucaucuacaacaacgauaucagcauuacacucagguaaugcguuaacagugcuaaauauguauugugcacuaguguuauuugguuuaaagccacuauaacacucaacccgagcucuugcagguauaauccuaguacacuuaucaaugcuauaaacagucauagcuuuugcacauaaggaaucaacagcagcaugggcacaagcaacaaaaacaauacgcgcaccuggguaguacaauccaaguccaauggaacaaugugacuuaccacuaccaggaggacccuguauuguaguuaucuuuuguuuaccaauaaguugguaauauggaaccaaauuagcauaugcaucacugacauuaaaagcagggugcaauuuauaaaugcuagaauacuucucuugguuugcaauaguuggugcacguaaagguuggacauugugagauguuaagacaaaaaucauaccaggaacuaacuuaguaguuacaguagacuuauacguaacaguaucagaaccauauucaaccuucucaaagaugaacucaccuauuuggaauuuugaguccuuacuuauuugaaaacaagugaaaacagaauuacgauucaaaggugguuuaacuuuaccacuuucccaacuaagaagcaauucuuuagguccaacaaccucuuuaagaguugcaaaagcauaagaagacuuaacacucucuucuuuagcuuuaauaguuucagccgcaaagagucuaaguguaucuuuaacaucauuagcaaguuuauagucccuaacaucaguccaaucagacguugcaagccuauuaaaaacuucaacaucuaaggaaccaguugcugaauuuuuauauaaaccaaauauauuaccagcugaacauaauggaaaagacaacugugguuuaugauuuguacaauaguaauucaaaccaccaagauacaauuuuuugacaucacuaacaccacaaccugaugcauuacauacauacgguguuauagccaaaauaaacuuguggucgguaccaaauacaugaucauaugcgcauuuagugcacaacauaggcuuacgcagacaaucaccacaacgaaguacaguuugugaaccacaaacaacacauaaaccagcagcuugcaauauuguagaauuuucauacauacuagcauaaaaaucuucacaccaaaacuuaucuucuugauuaucaagaaguguaacagaaaaagauucaagaacacccucauucaaauuuuuguuaagaugcuuaacccaaucaaguaauacguaaaaaaccuuacgauauucggaauuaggguguuuugaaagaggguaugcaucaauagcuaaagacacauaacguucuaacaaaacaacagcaucugucuuaacaacaucaucaacaaaaacaccagcugacaagauccuacuaggaucuggguaaggcaaauaauagguaccaucuuugucaacuauuugcauaguaugcugggaacaaaacucauguggucccuuaguuaaaucuucuucaacccaacauuuagaaguacucauaaagacauuauucugguaauacaaaguggcuuuaaaagcacuaaugucugcuauauaaccuaacucagcauaauccuuguuauaacagacaacaccgucaucagagagaaucaucauugaaaaauguuuccuaagauaaccauaauaaucaucaaugaaugacucuucaacacuaguuaaccuauaacaauuaucauacagacgucguuguagaucccuaacauuaacauuauuacaugaaucugaugggacacuaagcaaccuguuaauguuagaacucacggcuugaaaaauguuaaaaauagaauuagcauaagcuguacuagcgucaccagaagucguaccaccuggcuuaaaauaaaaaccaccauuagaauaaacaacuucuguuaaaacuugugccaacucauuaccaagccuauaaaaccuaucuguugcaguacaacaauuaacaugcuuagagcccaacaccauggcugaaaucauacguaucauguuaggcaaagcucuaucacauuugggauaaucccaacccauaagcauaggguuuucaacaccaucaauuaaaguacgcaacauauuauuccaaccaccauaaaauuugguaguaccaauaacaacaguggcauugcguguauuaacaauggauuuaagauguuuuugaugguauugucuuguggucauuguagacaacagagaaacaccaccaacaguucuagcacguucuuuaccacuaauagcauacuuaagauucagcugugucauaguagggaggacauuacgcuuugucaaagcaaacaaagcauccuguucuucauaagauauagauucauaauacaaacuagcuuuaccaaacuuauuuaauggccaaccagcacucuuauuaagauuuguuacaacaacuucacaugccuuaauacagccaccuucauaaaugucaaaauaacgagagacuaucuuauauguaacucuagcuugacaaauaucuaaaaugguaggcuuauuauaacgguaaaagucaaaaucuuuaacagcagcaucaccauucugugcgaagaagaaauguuuuaauguaaguucagaaccuucaucaaagaaaccucuuaaacgaagaaaguuauaaaacucuucauuaaaaugaccuggcuuaacaacuugauuugucaaaccaguacucaaugcugcaacagaaaaacaaauagugcguugaucaacgagugcuggggaagaagcuauuaucaaggaagggucggugacaaauugcaaaaguucaguaauugucaaccuaacugaguguguguuaacaucuuuauuccaaaccaaaccuaauugcuuaaaaugauaaccagcaguuguaacaaguggaacaccaucuauaaaaacuuuacgacauaguggaccaaaagcaguaccugguauaguuguggcaaauaguguauuaaaauuagcacaauguauaacacacauaucaucauaacagucacuacaauuaggaugauaaucaaaacuccaaugcuuaaaguacuuauugaauaaauuuucuuuauguucagugaaaucauacuuaagcaaaucaaaaguuuuaaaaucacuaccaaaaauaucacucuugacaaaacacucacuagcuaaacaauuaguuaaacccauaauaggcaucauauaagaauaauaugauguacaacagggaacacccauauuagguaagcuaacaacaaaaucaccaaaaucauaaaaguuaccauuaagaucuugguuaucuaauguuaaaacaccaacaacaccuuuagcaaccaucgcaucgcauagagcaacgcauuuaagcauagcucuagcuacaauuuugccaagagaugcauaaacucuauguauaucuucauuuucaacugggucauaccaacccuuacuaucaaaauaagaauugucacaacaaccaguuaaaacuaauacuucuuuuagaacaucacaauuuuguucaucaaaguuacgcauagcauagaccaaguccaucauaguauauuuaguaagauuaugucuacuaacauuaccauaaaugacucugccaucuuuccaaguaaagaaaucaugcucagccaaagcaccagaaaaguuaaguagguuauacauggauugcucguguuccauaaccgacuuaguacaccucuuuauaacaaaauaaccauccuuaagaucagcauuuuuaaaacgaacacaguucaucuucaaacacuuacccaagaaugaaacauuuuuauuauaaaugucaaaagcacgaacacacuuaucgauguccgugccauugcaggguucuagucgagcugcacuagaaccccuugcucguuuaaauaagaaaugucaacacuuugaauaguuguacggucacaagcacacccgugucccaaccaacaaccacaaacauuacacacauuauuuucuaaacaaaaccuaauaggauccaaacaaccaauaggaaccugaacacauuuacccuuaaacuuacaguaaccauccauacuagggugaggaacgugggcccgacaauacaaacaaauagacgcuccaccauaagaaucuugauugguguuagcaucuacacuaguuguuauagcuugaccauuaccagcaccauuagauaacaucuuaauacaauuacuuacagguuuugcaccauguuuaacagcuuccaaguaaguaguugcuggaucaacagaaaaagcacaagcaguuaaaaguccagaauuaacagccaauucaguuuguuuaccagcuuguagacgaauuguggcaccuauaaaaccaagaacggcaccucuacguaagguauuuaaauuuuuaacaaaauacaaauacuucacuugaggaccauuagguguuucgaccauaaaucgacaaggagagucuaacucgauuguguugcaaccacccucauacucccacuuaacaaauuuaaggucagcuuuauuagaaauauaagcguacauaaaaguuuuaccacccucaguauuauacaaggcauuaccaucaccuaaaacaccaccaucacccucagcuuucauagguuuuugcuuaaguuuaccaggcauaauuucauuauuuugaaguuuaacaacacguucacaauuaaggauaagaggccaugucaaaguuucaacauuuuccuuuguaaucucuuuaacaugaacaggucuaccaucauugucuuuaacaucauuaaguguccaaacaacuccagcauaaugaacagaaccaucacaaacaaucuuagaauaagauucaagaucuggacuaacaauaguuaguuuagaagcugaaguugcagguauaacugacaauggcacaacaccaucacgugcuaaauucaaaacaguuucaacacuagacauauccaaacgucuuaacauuccaaaaaguaaagagugcauagcacuaauaacuuuagauuuucuauuaacagagcgugcuucuuuauacaucugaguagcagcuuguucagccauucuauuaauuuucuucugaacagauaucucaugaucaaauucagacuuugcgauauucauggcacgcuucaauuguuuaauaaguugagaagaagauccauuagcaauagcauccucauaagcuugucuagcauuuucauaagcaauauaugauggcauacuaacaaaugaugaagcaacacucugaagggugcuacuauuaucaaaauaagaaucaauaaggccaucaagaccaaaaucacuauguuuacuuagaaagaacgcaaggagugcuaacaacauacuuugagcuuuuucagggucaucacaaagauuaaucuuauuguguaaaucaacacaauaagcccauucacuagaauuagcugcaauguucauacuagacaaacaacccaauaacacaacauuaguacacuucaaaucagucaguuuggauuggacaguugaaauuuuuauacaacggucaccaccaauaccaaguaguuugaaugauaaccaaagugcaucaaaagguccauguggugcaugaaguccauuagcaaccauguauuuaaauucagcagcacucaccuuaaaaucauaaacacccauaguacauuuaaaaaaccuauugaaccaauacaaaaugccccaauaaguacaaacuaaauaaccacaaauuaaauaaacaacuaaaguaaguuucacaucaccaaaaacacuaaauacacuuucaggugaaaaaaauacaaucaaacgugacaaccuaaaaacaauggcaccaauguaccaaucacuagauauagcacauaaaaacauaacaagcaaacucaaaaagucaccacuauaaaaauaaguguaagcaacugcuauaagagaacacacauauguaaaccaauguguaaaacguucuuuagaaaagcgccauguguguaaaaauacaacaaauaaacagaccaaaacauuaacuaaacccugaacauccauuuguaauacugaaacauuauaguuaaaauggucagccaaaaauuuuacuauguaauaauccaaaacacaauuauauaaagcaguugcaauaacaguagguaauaaaaauacuugcaaaaacaaaaacuuauguuuaagaaacauaguuaaaacuaaugacaaaaacaaaaguagacaaaauauagguguaaguaucacaggguuuauccauauaguguuuguauaaauaaagaguucugcccaaaacauugugaagaaaacgcuaaauaaaaacauuguuuuuaaaccaaaaauaaccuuaccacuuugcaaguuaacaccauacaucugcuucacaacuucagcuagugugaacucaucacauaaacuagaauaaccaaguauguuuuuaccaccaaaaccuucaugaagauguugaauggaagcuaacaauuguucaacacuaacaccaguuuuugcugccaaaauagaauagcacucaacacuagaaacacuuguauaaccauuagccauagcccauucauuaaaaccaucaacauuaacucuaguugaacacaaccaccaccuacaaccauucaacaaagcagcauacaaaaaggcaacaacauuaucugauagcauaagguuggcacucucaacuugcaaacuagguuggucaucaaaauuaccauaaacacuaccaguaaaaucagaaccaacaugagcaccacuaccuaacucaauuugguguaaauaacaaaacucaacaguaccaucauuucuaacauuauaaccaggagaaccacaagcuccauuuauaaaagaaccuuuaauaguaaaguuuguacguaaauuaacaccaaaaacaccagaugcaauaccuucauaacaugcuaaaauauuaaaagaaucaccagguuucaacguuuuaaaaacauguuuagguguauguacauuagauugugaaaccuuaauacgcaacacagaaccaugcauuguaacaccgacaacucccaagaagacaccauuaugagacacugaaaaauuaugcaaacgcauaguacuauaugcaugaucauaaucaauaagaacagugguugauggugcuaugacaugucuaggacaaguaacagugucaccuaaccaaacuccauuaagcacaguacuaccauaacagacgcgaaccacacaucucucaacacaaccagaugguugugccaucuucuuaagaccagauuguaagguggaauuguagcuaauaguagguggagaauauaacaugucauuaugaucuuuugcauaaucuaacauagccuuggcuaaaugagcauaacaagcacaacgauaaucagccucacuagcacuaccacuauaauauuuauauuuauuauaacuugcagcauaauucuuaaguuucucaggugaaauaguauuuaucagccuuucauaagaacgcaugucaagaacaaauguaccugcagcagcacucucaaaaguaccuauaaacuuaucaccuucaaacaauugaguagagauuuuuaacuuaaaaacauuagguaaaagcucuaaaaaugcagcaaaacuaaaccaugugagaagccaccaugguauuaacaagaaguaugcaacaauguaugcaauaugccaaauccaagcauaacgcacuguccuaguaaaaacaaaauacaaaauagcauaaagcaacauaaaaaauaaauuuugaguaacaacauaagaaauguuauuaaucaaaguugcacaaacaacaguaaaaacaccauaagaaagaucaccaaaaacacguuuaaauuuaguaacuaaaaagcacaaaaauguaauaaaugcugcaaaaagaaaauuaaacaacauauguccagacauagccacaacgcuaaaagaugaacuaaagauugagaguacauuaacaagaaggucuauaagaccaucaccacaaauguaaccgucaucaacacguccaucauuaacauaccauuuaucaaaaccaaaacaaacaccuuuaugugagucacggcauucaccaacucuacaauaacguguagccaaaguucuaauaguacguaagccaaaaccucuagcuaaaauuucuggaaaacguacauaauuuuuagcaucauacuuauaauacgcauugggcuguaaaguacuauaagguuuagaaccuucaauaagaucaguguuguaacaauaaacauugucaccacccaaaccuuccaaccuaguacaagcagaauuaaaaauacacuuaucacuagugguaacaccaucaaagucauaacaaacaccuguguuuccaaaagcagccuguaauguaaaaacaagagucuuuccuaccaaauauacauuuguuggaacaccaggaacaacauuaauacgcucugaaacaccaacaacuauaggacauuuaucacuauuaguaguaacaacaccaaacuuagccucaugccauugauuaaaauuaucaaaaacauuacgaacacaguguaaaggugcuucaaacaccuucaacugaccauucucaauguacuuaaaaucauaaccaugaaagcuaguuacagugguuguauaaucaauaaaugagacaccaauaaacaaugcaacaacaaauaaacauacauaccacagaaaauuauaaguacguuuaaaaccagcacccuguuuugcaacuauacuaguagcaggaacuuguguaauugcuugguuaucauuaaaaguuaauaaaaaagucaaacccuuugcuuuaguuguuuuaacaagguacuucuuaccuucuugagaaagaguauuaaaguccuugacaccccaaacaauagguauugacucuuuaauuaaaacauuaugguuaacaaccuuagaaccggcacgcauacaacaagcaaugucauaaacggacaacuuaucuucagguuuagcauaagaaauaaaaaaauuauuaaaugacaaaucugaaagcaaaacgucauaccuaugugcauuggcaacagcugaaacaaaaucaucaucagaaacagucaaaccaaguguagcuuuacauucagccauggacauguuagcaguuaacuccuuaaaaaaacuauuacacaaaacaucaacauaugccuuaugcaaaacaccauuaaaaucaacagauaaaguugacaacaacucugaauuuaccaacuuuauagguucacacaacaauugagaaaaauaaacacaagcauuuuuaaucuguguaauguuacuaccacuauuauuguaaacaauaaaauuuucuaaaacauuacaauucuucagaaccucuuuacaacuauacuuagauucaguaaugucaaagucauaccgccaaaaagugucaccacuauaaagacgauaaaauccauuaacaaaaucuaccuuaucaauaauaacauaugcaggagcuguggguugaacagcuguuuuaacaacauuaccaagcucucuugcaauaucaccauuaauaaaaguauuaccaggcccaaaagaaucacaauuaacacaaaagaaguuauguuuauuacagaaacaaguaccaccauuagcauuaacauagaaugauuuaugcauaccauuaauaauaguuugaagugguacacguuuaagucuagcacuuuuagaacaagcuacacagucagcauuauuacagccaacaauaauaugucuaacaaauaaaacgauuuugcagacaauaaauguagcuaaaaacucauuacauaaaacaucaaacggcacaaaauguaaaaaccacuguuucugaugaaagccuaagaaagaaccaaaaguacuaauaaauugugcaacaaaauauaaaaguccaaaacgcaaauacauauuaccaaaaauuaacaaaauaacaaguauaacaaaugguuguaaacugauuaauauaggaucacgaaugugcuuccaaacaagacuaguaugauccaaaucauuaaacucuugauaacugaacaaacacaucuuacaaaccauagaauuaccacaauaaauauccuuauuaaaaguggauuuuucauaaccacuuacaaugucaccacauaaaagacuauuaaaaggacuaaauugcacaaucauaaaaacaagugcauaaauagcauauaauaauaauaagaacuuaaacaaaguaacaauaacacaccacuucugcuuuauaacaaacaaagcagaucuaauguuauacuuaaaacuacgugucaaaauaacaccuguacguuuaggagccuuggcaauaacuuuaauaucaugcuucauaauagaaguacguaaaagacuaaacauacuaagcaaccaaguuaaaaacagaacaauguuauucauaacaaaaucaccaaauuggaaaaauuuuugugcaccaguaucaaguuuauccauaacagaaauuuucucacuaacaauuguuggaacauuagauguuacacaaccaccuacuacaacaauagcuguaacagcuaaaguagacaaaucugaagaaaauaaacgagcaccaucauagacagcauuauuagcagcaucauaaacuacauagugaccguuaucaaaagaaccugaaaauguuguauaagcaauaccauuaagcaacuuagaagguugugaaauuauagguucaccaacauugguaauaacaacacguccauuaacaaacuuaacacgugaacgcaauuuaugucuguguggacaaaaaccaacaucacaaccaucuuuaagcacacuagcacagacaauagcacuuuuaacuucaacuacaguacuuuuacaaaugucacaaguugaauauuguucaagaguaacaauagaaucacuaaucaaauacucugacaauuuagauaaugccucuucagcaucacccuuuugacccuuugaagacauaguuauaaaauaaauaaaacuaacaaaagguccaacaucaccuguaacaaauuuguuccaaagaacauuuaaacccuuagauuuaaaaguaggcuuaagauacuguaaaauuauacaaguugcauuaacccaacaauuauugucgguggucccaagaacucuaaaaccaccaacaaaaucauuaggguaaccauauggcuuuacauccaaagaagcaaaaagugcugccuuuucaaaaccguaaaaagcaacccagucaacuucuggagcuacagauaagacaguaucaguauuaauagguaaaacaccuucaaaagagucaacaccaucacucacaacacccaauuguuuaccaagugacuuagaagacucaacaacaacaucuuuaacauuaauaccaucuucaguaauuuucaaaacuacauuaucauucuuaaaacagucguuaacauccauaacauuacucucuacaacaaauuuaacaguuaaagucaaacuugaaagaagcuuuuucaaaacaucaauagcaggaacauuggcaauaacacaaguuuucaaucuauuaaguuuacgcacacaacgaccaagauuuuuaucaaaagaaagaucauuuaucgaugguacaacacacauauaaaugguacaacucucaacaaaaaguuuaaccaaauuaccagcugguacaguuuuaacuguagcaagauaaucaagagcugccuguugcaaaauaccauuaaguuuuguguccaauaauuguccuuguuuauccaacauuaaaauagaguuaguaaauaauaaguaaauaucaccauccaaggcauugacaccacaaucaaagaaugaaaaauuaccuucaacucuaaaagguuuaacaacaucaacaucaucaaugacugguguuaaaucuaaaccaucuaaaaacuuaagaacagcuuguucuucauuugaagaauaaacaaaaacuugcaaugguuuauuaaugucacaacuaaacaaagcuuuaagagaauuuucaauccuuacaccaaaaauaccacaacuaagaagaggcauaaguggaauaccauuuucaaauaaaauagaauuauaagcuucaacaaguaaugaaugcucauguuuaccaguucgcggaccaacaacauuaaauacguugaauuuuucacacuccaacauaacaccugcuccaaccuuaaguggaccauuacuacuaauguaaucuuuagauaaugacugaaguugaccuucagucaaaauaucaauagcacgugcaacaccgccuccaugcaagagauuuucauuagcagcauugacaacaaagucaaaagaaacacaguuuacaaggugugaaauaucaccuaaauaaaauuuaacauuuuuauauacagcaaaagguuuaacuucaccagcuucuauuucuacacuaugaaaaucaacaucaacaaaacaaacaguauuaacacuacuauuuuuaaugucaaagacaccaaaaccaucaauagcuuuguuaaaacuguauaaauuuguuugauaaugaccagaacccuuaacaccuaaauauacagaugaacauauagguuucacagggaaagcaucaaugucaauaggugcuggauccuguacaaacacaccaguaccuuucauacuaacaagcuuauaagucugcauuuuaugacaaauacaacacucaccuuuuugaaaaaguuuuguguaaggcauaauccaaaacaaacaaccaaccugaucaucaaacuuuuuaccacaaucacaagacaucucaaaaguuauagaacauguauauuuuucuuuaagaaguucacuaagaaguuuaccacuaucaccaagugaaccacuaauuaaaugagacaacucauaacacuuuuggacaauugaaucaacuuuaccaacuuuaaacaauugcaucucaauagaaucauccaaaagcuuuguaaguugcaacuguacaagugugguacuaauccaacaauuauuaucagauugaucuaaaacacgaacacccaauucaucucuaaaagaaaaagaaaaagguugcuuaauugagagcacauguucaacuucuucaaaagguuguucaauuauaucaaccucuucucuaacagagucaucaacaauacauucuaauugaugaaaaucagugcucgcuucaacaacacaaccauuacuaucauuacuaauaggccauugugaaaucauaacugguuuagaaacaucauaaccacccucuucaucauaaauauaaaauuguggcaacuuaauauguugcccaaugacauucauugcagauguaagaacuucauguagaccuucccaaucaccuguauaaauaauggacuuaccaaaacucuucuuacaaagacugguaacaacaucaucuucaaacucaaauaugagcuugacuuuauggguagguucaacaucaugaacuauaacaucaucagaaaaagauauuuuaccaccagcuaauuuuguaaaagcaacaggcaauacaccauuacaugaagcuggauaauaaaugucaucuacaacauaccaaagauaaucaccagaaacaaaaaauugaccaccauccuuagguucaacaaaaacaguuucuuuaagcucuaaauguucaacaucaauggcauuagguuuacuaacaccaaaacaagugucuaaaaauucauagaaaaaggugacacaacuaacacaaggaaaagucaugucacaccuuucucuacgaauuacacgacuuacaaaaccacuaauaacuacauauggaacauuaacagcauaauauuugaugcaaacaccagcaguguaugcgacacuacagacaguuucaagaaaaccauuauagacaucaagcaauuuuaccaaaacacgucuaaaacguuuggcacaauuaccuaaaagaccauuagaaguaaguguaagcuuaagaguuuuuaaccaaucuguaacaaaauuaaacuuuucaacaaaaagauuccauaaauggccaucaucaauacucaacaguauuucaggacacuuagguaaaaaccucucaagcaaaacuuuagacucugaugcuugaacaauagcacauugaggguuauuacucugcaagauagcauuauaaucagucaaaaaccauggcucaccacaauuaucaaugcagaauugcucccaaacauuauaacaguccuuaaaacacacauguguagcgaauguagcaucacgucuaacaaugacacuacagccaucaaccacacauguguacacaaaaacugcaguuuuaaaauccaauaacaacagcucaacagcaauaauggcaucuguagcagaacuagcaguaacaaacugaugguuaaaaccaucaagcuuaaaaccacuaaacuuaauaguguagaauaaaucaccaguaaaaacaggaucauuuaauacaguuguaggaucaaccauaaaacgauaaaaaccaccacuauagaaaaaagcuuguccagcaauaacaacaaucuuaccuuuagggcaaacuacaggugcacaaucaacaagacgcaaauuaacaguggcaaguucaauaacagaaaacuuaacuucaguuguaggaccuacaacuacuuuaguaaacauggcuuucuuuaugcgagcaucacgaacaccacgaacaacuucaguagucaaacgaacaagagcguuuucaguaagaacauaaucaccaagucguuuaaauuuaacaucaccaauuuuaaauacaucuaaagaaaaaucaaaugcagcacaaauagcuuguguaaaugugcgauaaacugauugaaaagcaucuggaacaucugcacacauaauaauaacaccauuagagacaguuaaaacaguugaagcaauagacuuaacaaaccuaaccaaaacaccaguaguaguugguacaagcuuaauagcggcaacaaaagcaucccagauugcaucaaaaagcccagaagcuuugcguacaaaccaagguuuauuguuugucaauaugucaucguaaagaccaaacauaccagcacuaaugucaauaacaccagugcuagcagcaaauuuaacaucuucuguaacagaagcaccaagaaaagcuagacguaauugauuagaaaguaaaguguuaacaucaaagcaaaaagggucuaaugaauuucuaugcaagagugcaucauaagaagaugaugccacaaacauuccaucagaaugaacagcuguaacacgccauaaagacacaccaguaauguuaguaauauguuuaacaacuaagccagcauaguauuuaacaccacaaccagcacuaguugaggugaugaucacaucaccaggaacgacauuaccaggaacaacacaaaguuucuuagcaggugugccacaacaagaagauaaguaaccaucccaugcaccaacacuccaacucucagaaccacaauugcauuuaacaaaagcauuaaagaaaacugguuuaacaauuauaucuagcaaugacauaccauuuguaauaaauggugaaccaaacgcccuauacacagcauuccauucaccacucaaaacaaccuuagaagaauauuuaggcggcuuagcauuaguaaguuugcaaccagacuucaaaguaugaccuguaguaccaagguaaugaaugcucucaauggcuaaaacauuuugcuguucauaagaaaggucuuuacguauaacaucccaugcuaguugauaagugacaccaccaauaacaauacuaucaguauuauuauuaaaguaaucccuaaauucccacauguuuuuagguaacacagguuuaccaucaaaaccacacauguacuuauccacaaaaaccacacuuccugcaccauggccaaaaacaacaucaaaguccugaagaacauaauugcuguuagaaaaaaugagccaaccucgcaaauuaaggggucuaucagaaaaagguaaaauuuuggcacagagcugauuaguaccagucaaugcaaugacauaaucaucaucauuaauaccgguuacacaauccuguaagccaaaagcaacaaaacggcaugccugaaaaccuugugcagcggcuucgcuauaggugcgaacggcuacagaaggaauggcaaaaccaaaaccugaaauuuccgaaucacuugcaacagcaagugucacuugauuguaaaacaugguuagcaguuauugguuuccacaacgacagaacguugcuuccacaauaagcagugacggaacaccacuuaaauaucaauguaugcacuagugaacagaaucaccagugcuuagacacagaaaauacaacacuugccuaaccaguuuacaaacuugacgaaauuucaauuacacuaggacugccauaacaaaugacagcacuagaaaaauuucguuuaguugagaagaguagacacaaagucuaaauaagaaaauucucuaucuauagauagaaaaauucuuuaag

SEQ ID NO: 17 - DNA, 29751 bp, Unknown
  Description of Unknown: SARS coronavirus Tor2 sequence
atattaggtttttacctacccaggaaaagccaaccaacctcgatctcttgtagatctgttctctaaacgaactttaaaatctgtgtagctgtcgctcggctgcatgcctagtgcacctacgcagtataaacaataataaattttactgtcgttgacaagaaacgagtaactcgtccctcttctgcagactgcttacggtttcgtccgtgttgcagtcgatcatcagcatacctaggtttcgtccgggtgtgaccgaaaggtaagatggagagccttgttcttggtgtcaacgagaaaacacacgtccaactcagtttgcctgtccttcaggttagagacgtgctagtgcgtggcttcggggactctgtggaagaggccctatcggaggcacgtgaacacctcaaaaatggcacttgtggtctagtagagctggaaaaaggcgtactgccccagcttgaacagccctatgtgttcattaaacgttctgatgccttaagcaccaatcacggccacaaggtcgttgagctggttgcagaaatggacggcattcagtacggtcgtagcggtataacactgggagtactcgtgccacatgtgggcgaaaccccaattgcataccgcaatgttcttcttcgtaagaacggtaataagggagccggtggtcatagctatggcatcgatctaaagtcttatgacttaggtgacgagcttggcactgatcccattgaagattatgaacaaaactggaacactaagcatggcagtggtgcactccgtgaactcactcgtgagctcaatggaggtgcagtcactcgctatgtcgacaacaatttctgtggcccagatgggtaccctcttgattgcatcaaagattttctcgcacgcgcgggcaagtcaatgtgcactctttccgaacaacttgattacatcgagtcgaagagaggtgtctactgctgccgtgaccatgagcatgaaattgcctggttcactgagcgctctgataagagctacgagcaccagacacccttcgaaattaagagtgccaagaaatttgacactttcaaaggggaatgcccaaagtttgtgtttcctcttaactcaaaagtcaaagtcattcaaccacgtgttgaaaagaaaaagactgagggtttcatggggcgtatacgctctgtgtaccctgttgcatctccacaggagtgtaacaatatgcacttgtctaccttgatgaaatgtaatcattgcgatgaagtttcatggcagacgtgcgactttctgaaagccacttgtgaacattgtggcactgaaaatttagttattgaaggacctactacatgtgggtacctacctactaatgctgtagtgaaaatgccatgtcctgcctgtcaagacccagagattggacctgagcatagtgttgcagattatcacaaccactcaaacattgaaactcgactccgcaagggaggtaggactagatgttttggaggctgtgtgtttgcctatgttggctgctataataagcgtgcctactgggttcctcgtgctagtgctgatattggctcaggccatactggcattactggtgacaatgtggagaccttgaatgaggatctccttgagatactgagtcgtgaacgtgttaacattaacattgttggcgattttcatttgaatgaagaggttgccatcattttggcatctttctctgcttctacaagtgcctttattgacactataaagagtcttgattacaagtctttcaaaaccattgttgagtcctgcggtaactataaagttaccaagggaaagcccgtaaaaggtgcttggaacattggacaacagagatcagttttaacaccactgtgtggttttccctcacaggctgctggtgttatcagatcaatttttgcgcgcacacttgatgcagcaaaccactcaattcctgatttgcaaagagcagctgtcaccatacttgatggtatttctgaacagtcattacgtcttgtcgacgccatggtttatacttcagacctgctcaccaacagtgtcattattatggcatatgtaactggtggtcttgtacaacagacttctcagtggttgtctaatcttttgggcactactgttgaaaaactcaggcctatctttgaatggattgaggcgaaacttagtgcaggagttgaatttctcaaggatgcttgggagattctcaaatttctcattacaggtgtttttgacatcgtcaagggtcaaatacaggttgcttcagataacatcaaggattgtgtaaaatgcttcattgatgttgttaacaaggcactcgaaatgtgcattgatcaagtcactatcgctggcgcaaagttgcgatcactcaacttaggtgaagtcttcatcgctcaaagcaagggactttaccgtcagtgtatacgtggcaaggagcagctgcaactactcatgcctcttaaggcaccaaaagaagtaacctttcttgaaggtgattcacatgacacagtacttacctctgaggaggttgttctcaagaacggtgaactcgaagcactcgagacgcccgttgatagcttcacaaatggagctatcgttggcacaccagtctgtgtaaatggcctcatgctcttagagattaaggacaaagaacaatactgcgcattgtctcctggtttactggctacaaacaatgtctttcgcttaaaagggggtgcaccaattaaaggtgtaacctttggagaagatactgtttgggaagttcaaggttacaagaatgtgagaatcacatttgagcttgatgaacgtgttgacaaagtgcttaatgaaaagtgctctgtctacactgttgaatccggtaccgaagttactgagtttgcatgtgttgtagcagaggctgttgtgaagactttacaaccagtttctgatctccttaccaacatgggtattgatcttgatgagtggagtgtagctacattctacttatttgatgatgctggtgaagaaaacttttcatcacgtatgtattgttccttttaccctccagatgaggaagaagaggacgatgcagagtgtgaggaagaagaaattgatgaaacctgtgaacatgagtacggtacagaggatgattatcaaggtctccctctggaatttggtgcctcagctgaaacagttcgagttgaggaagaagaagaggaagactggctggatgatactactgagcaatcagagattgagccagaaccagaacctacacctgaagaaccagttaatcagtttactggttatttaaaacttactgacaatgttgccattaaatgtgttgacatcgttaaggaggcacaaagtgctaatcctatggtgattgtaaatgctgctaacatacacctgaaacatggtggtggtgtagcaggtgcactcaacaaggcaaccaatggtgccatgcaaaaggagagtgatgattacattaagctaaatggccctcttacagtaggagggtcttgtttgctttctggacataatcttgctaagaagtgtctgcatgttgttggacctaacctaaatgcaggtgaggacatccagcttcttaaggcagcatatgaaaatttcaattcacaggacatcttacttgcaccattgttgtcagcaggcatatttggtgctaaaccacttcagtctttacaagtgtgcgtgcagacggttcgtacacaggtttatattgcagtcaatgacaaagctctttatgagcaggttgtcatggattatcttgataacctgaagcctagagtggaagcacctaaacaagaggagccaccaaacacagaagattccaaaactgaggagaaatctgtcgtacagaagcctgtcgatgtgaagccaaaaattaaggcctgcattgatgaggttaccacaacactggaagaaactaagtttcttaccaataagttactcttgtttgctgatatcaatggtaagctttaccatgattctcagaacatgcttagaggtgaagatatgtctttccttgagaaggatgcaccttacatggtaggtgatgttatcactagtggtgatatcacttgtgttgtaataccctccaaaaaggctggtggcactactgagatgctctcaagagctttgaagaaagtgccagttgatgagtatataaccacgtaccctggacaaggatgtgctggttatacacttgaggaagctaagactgctcttaagaaatgcaaatctgcattttatgtactaccttcagaagcacctaatgctaaggaagagattctaggaactgtatcctggaatttgagagaaatgcttgctcatgctgaagagacaagaaaattaatgcctatatgcatggatgttagagccataatggcaaccatccaacgtaagtataaaggaattaaaattcaagagggcatcgttgactatggtgtccgattcttcttttatactagtaaagagcctgtagcttctattattacgaagctgaactctctaaatgagccgcttgtcacaatgccaattggttatgtgacacatggttttaatcttgaagaggctgcgcgctgtatgcgttctcttaaagctcctgccgtagtgtcagtatcatcaccagatgctgttactacatataatggatacctcacttcgtcatcaaagacatctgaggagcactttgtagaaacagtttctttggctggctcttacagagattggtcctattcaggacagcgtacagagttaggtgttgaatttcttaagcgtggtgacaaaattgtgtaccacactctggagagccccgtcgagtttcatcttgacggtgaggttctttcacttgacaaactaaagagtctcttatccctgcgggaggttaagactataaaagtgttcacaactgtggacaacactaatctccacacacagcttgtggatatgtctatgacatatggacagcagtttggtccaacatacttggatggtgctgatgttacaaaaattaaacctcatgtaaatcatgagggtaagactttctttgtactacctagtgatgacacactacgtagtgaagctttcgagtactaccatactcttgatgagagttttcttggtaggtacatgtctgctttaaaccacacaaagaaatggaaatttcctcaagttggtggtttaacttcaattaaatgggctgataacaattgttatttgtctagtgttttattagcacttcaacagcttgaagtcaaattcaatgcaccagcacttcaagaggcttattatagagcccgtgctggtgatgctgctaacttttgtgcactcatactcgcttacagtaataaaactgttggcgagcttggtgatgtcagagaaactatgacccatcttctacagcatgctaatttggaatctgcaaagcgagttcttaatgtggtgtgtaaacattgtggtcagaaaactactaccttaacgggtgtagaagctgtgatgtatatgggtactctatcttatgataatcttaagacaggtgtttccattccatgtgtgtgtggtcgtgatgctacacaatatctagtacaacaagagtcttcttttgttatgatgtctgcaccacctgctgagtataaattacagcaaggtacattcttatgtgcgaatgagtacactggtaactatcagtgtggtcattacactcatataactgctaaggagaccctctatcgtattgacggagctcaccttacaaagatgtcagagtacaaaggaccagtgactgatgttttctacaaggaaacatcttacactacaaccatcaagcctgtgtcgtataaactcgatggagttacttacacagagattgaaccaaaattggatgggtattataaaaaggataatgcttactatacagagcagcctatagaccttgtaccaactcaaccattaccaaatgcgagttttgataatttcaaactcacatgttctaacacaaaatttgctgatgatttaaatcaaatgacaggcttcacaaagccagcttcacgagagctatctgtcacattcttcccagacttgaatggcgatgtagtggctattgactatagacactattcagcgagtttcaagaaaggtgctaaattactgcataagccaattgtttggcacattaaccaggctacaaccaagacaacgttcaaaccaaacacttggtgtttacgttgtctttggagtacaaagccagtagatacttcaaattcatttgaagttctggcagtagaagacacacaaggaatggacaatcttgcttgtgaaagtcaacaacccacctctgaagaagtagtggaaaatcctaccatacagaaggaagtcatagagtgtgacgtgaaaactaccgaagttgtaggcaatgtcatacttaaaccatcagatgaaggtgttaaagtaacacaagagttaggtcatgaggatcttatggctgcttatgtggaaaacacaagcattaccattaagaaacctaatgagctttcactagccttaggtttaaaaacaattgccactcatggtattgctgcaattaatagtgttccttggagtaaaattttggcttatgtcaaaccattcttaggacaagcagcaattacaacatcaaattgcgctaagagattagcacaacgtgtgtttaacaattatatgccttatgtgtttacattattgttccaattgtgtacttttactaaaagtaccaattctagaattagagcttcactacctacaactattgctaaaaatagtgttaagagtgttgctaaattatgtttggatgccggcattaattatgtgaagtcacccaaattttctaaattgttcacaatcgctatgtggctattgttgttaagtatttgcttaggttctctaatctgtgtaactgctgcttttggtgtactcttatctaattttggtgctccttcttattgtaatggcgttagagaattgtatcttaattcgtctaacgttactactatggatttctgtgaaggttcttttccttgcagcatttgtttaagtggattagactcccttgattcttatccagctcttgaaaccattcaggtgacgatttcatcgtacaagctagacttgacaattttaggtctggccgctgagtgggttttggcatatatgttgttcacaaaattcttttatttattaggtctttcagctataatgcaggtgttctttggctattttgctagtcatttcatcagcaattcttggctcatgtggtttatcattagtattgtacaaatggcacccgtttctgcaatggttaggatgtacatcttctttgcttctttctactacatatggaagagctatgttcatatcatggatggttgcacctcttcgacttgcatgatgtgctataagcgcaatcgtgccacacgcgttgagtgtacaactattgttaatggcatgaagagatctttctatgtctatgcaaatggaggccgtggcttctgcaagactcacaattggaattgtctcaattgtgacacattttgcactggtagtacattcattagtgatgaagttgctcgtgatttgtcactccagtttaaaagaccaatcaaccctactgaccagtcatcgtatattgttgatagtgttgctgtgaaaaatggcgcgcttcacctctactttgacaaggctggtcaaaagacctatgagagacatccgctctcccattttgtcaatttagacaatttgagagctaacaacactaaaggttcactgcctattaatgtcatagtttttgatggcaagtccaaatgcgacgagtctgcttctaagtctgcttctgtgtactacagtcagctgatgtgccaacctattctgttgcttgaccaagctcttgtatcagacgttggagatagtactgaagtttccgttaagatgtttgatgcttatgtcgacaccttttcagcaacttttagtgttcctatggaaaaacttaaggcacttgttgctacagctcacagcgagttagcaaagggtgtagctttagatggtgtcctttctacattcgtgtcagctgcccgacaaggtgttgttgataccgatgttgacacaaaggatgttattgaatgtctcaaactttcacatcactctgacttagaagtgacaggtgacagttgtaacaatttcatgctcacctataataaggttgaaaacatgacgcccagagatcttggcgcatgtattgactgtaatgcaaggcatatcaatgcccaagtagcaaaaagtcacaatgtttcactcatctggaatgtaaaagactacatgtctttatctgaacagctgcgtaaacaaattcgtagtgctgccaagaagaacaacataccttttagactaacttgtgctacaactagacaggttgtcaatgtcataactactaaaatctcactcaagggtggtaagattgttagtacttgttttaaacttatgcttaaggccacattattgtgcgttcttgctgcattggtttgttatatcgttatgccagtacatacattgtcaatccatgatggttacacaaatgaaatcattggttacaaagccattcaggatggtgtcactcgtgacatcatttctactgatgattgttttgcaaataaacatgctggttttgacgcatggtttagccagcgtggtggttcatacaaaaatgacaaaagctgccctgtagtagctgctatcattacaagagagattggtttcatagtgcctggcttaccgggtactgtgctgagagcaatcaatggtgacttcttgcattttctacctcgtgtttttagtgctgttggcaacatttgctacacaccttccaaactcattgagtatagtgattttgctacctctgcttgcgttcttgctgctgagtgtacaatttttaaggatgctatgggcaaacctgtgccatattgttatgacactaatttgctagagggttctatttcttatagtgagcttcgtccagacactcgttatgtgcttatggatggttccatcatacagtttcctaacacttacctggagggttctgttagagtagtaacaacttttgatgctgagtactgtagacatggtacatgcgaaaggtcagaagtaggtatttgcctatctaccagtggtagatgggttcttaataatgagcattacagagctctatcaggagttttctgtggtgttgatgcgatgaatctcatagctaacatctttactcctcttgtgcaacctgtgggtgctttagatgtgtctgcttcagtagtggctggtggtattattgccatattggtgacttgtgctgcctactactttatgaaattcagacgtgtttttggtgagtacaaccatgttgttgctgctaatgcacttttgtttttgatgtctttcactatactctgtctggtaccagcttacagctttctgccgggagtctactcagtcttttacttgtacttgacattctatttcaccaatgatgtttcattcttggctcaccttcaatggtttgccatgttttctcctattgtgcctttttggataacagcaatctatgtattctgtatttctctgaagcactgccattggttctttaacaactatcttaggaaaagagtcatgtttaatggagttacatttagtaccttcgaggaggctgctttgtgtacctttttgctcaacaaggaaatgtacctaaaattgcgtagcgagacactgttgccacttacacagtataacaggtatcttgctctatataacaagtacaagtatttcagtggagccttagatactaccagctatcgtgaagcagcttgctgccacttagcaaaggctctaaatgactttagcaactcaggtgctgatgttctctaccaaccaccacagacatcaatcacttctgctgttctgcagagtggttttaggaaaatggcattcccgtcaggcaaagttgaagggtgcatggtacaagtaacctgtggaactacaactcttaatggattgtggttggatgacacagtatactgtccaagacatgtcatttgcacagcagaagacatgcttaatcctaactatgaagatctgctcattcgcaaatccaaccatagctttcttgttcaggctggcaatgttcaacttcgtgttattggccattctatgcaaaattgtctgcttaggcttaaagttgatacttctaaccctaagacacccaagtataaatttgtccgtatccaacctggtcaaacattttcagttctagcatgctacaatggttcaccatctggtgtttatcagtgtgccatgagacctaatcataccattaaaggttctttccttaatggatcatgtggtagtgttggttttaacattgattatgattgcgtgtctttctgctatatgcatcatatggagcttccaacaggagtacacgctggtactgacttagaaggtaaattctatggtccatttgttgacagacaaactgcacaggctgcaggtacagacacaaccataacattaaatgttttggcatggctgtatgctgctgttatcaatggtgataggtggtttcttaatagattcaccactactttgaatgactttaaccttgtggcaatgaagtacaactatgaacctttgacacaagatcatgttgacatattgggacctctttctgctcaaacaggaattgccgtcttagatatgtgtgctgctttgaaagagctgctgcagaatggtatgaatggtcgtactatccttggtagcactattttagaagatgagtttacaccatttgatgttgttagacaatgctctggtgttaccttccaaggtaagttcaagaaaattgttaagggcactcatcattggatgcttttaactttcttgacatcactattgattcttgttcaaagtacacagtggtcactgtttttctttgtttacgagaatgctttcttgccatttactcttggtattatggcaattgctgcatgtgctatgctgcttgttaagcataagcacgcattcttgtgcttgtttctgttaccttctcttgcaacagttgcttactttaatatggtctacatgcctgctagctgggtgatgcgtatcatgacatggcttgaattggctgacactagcttgtctggttataggcttaaggattgtgttatgtatgcttcagctttagttttgcttattctcatgacagctcgcactgtttatgatgatgctgctagacgtgtttggacactgatgaatgtcattacacttgtttacaaagtctactatggtaatgctttagatcaagctatttccatgtgggccttagttatttctgtaacctctaactattctggtgtcgttacgactatcatgtttttagctagagctatagtgtttgtgtgtgttgagtattacccattgttatttattactggcaacaccttacagtgtatcatgcttgtttattgtttcttaggctattgttgctgctgctactttggccttttctgtttactcaaccgttacttcaggcttactcttggtgtttatgactacttggtctctacacaagaatttaggtatatgaactcccaggggcttttgcctcctaagagtagtattgatgctttcaagcttaacattaagttgttgggtattggaggtaaaccatgtatcaaggttgctactgtacagtctaaaatgtctgacgtaaagtgcacatctgtggtactgctctcggttcttcaacaacttagagtagagtcatcttctaaattgtgggcacaatgtgtacaactccacaatgatattcttcttgcaaaagacacaactgaagctttcgagaagatggtttctcttttgtctgttttgctatccatgcagggtgctgtagacattaataggttgtgcgaggaaatgctcgataaccgtgctactcttcaggctattgcttcagaatttagttctttaccatcatatgccgcttatgccactgcccaggaggcctatgagcaggctgtagctaatggtgattctgaagtcgttctcaaaaagttaaagaaatctttgaatgtggctaaatctgagtttgaccgtgatgctgccatgcaacgcaagttggaaaagatggcagatcaggctatgacccaaatgtacaaacaggcaagatctgaggacaagagggcaaaagtaactagtgctatgcaaacaatgctcttcactatgcttaggaagcttgataatgatgcacttaacaacattatcaacaatgcgcgtgatggttgtgttccactcaacatcataccattgactacagcagccaaactcatggttgttgtccctgattatggtacctacaagaacacttgtgatggtaacacctttacatatgcatctgcactctgggaaatccagcaagttgttgatgcggatagcaagattgttcaacttagtgaaattaacatggacaattcaccaaatttggcttggcctcttattgttacagctctaagagccaactcagctgttaaactacagaataatgaactgagtccagtagcactacgacagatgtcctgtgcggctggtaccacacaaacagcttgtactgatgacaatgcacttgcctactataacaattcgaagggaggtaggtttgtgctggcattactatcagaccaccaagatctcaaatgggctagattccctaagagtgatggtacaggtacaatttacacagaactggaaccaccttgtaggtttgttacagacacaccaaaagggcctaaagtgaaatacttgtacttcatcaaaggcttaaacaacctaaatagaggtatggtgctgggcagtttagctgctacagtacgtcttcaggctggaaatgctacagaagtacctgccaattcaactgtgctttccttctgtgcttttgcagtagaccctgctaaagcatataaggattacctagcaagtggaggacaaccaatcaccaactgtgtgaagatgttgtgtacacacactggtacaggacaggcaattactgtaacaccagaagctaacatggaccaagagtcctttggtggtgcttcatgttgtctgtattgtagatgccacattgaccatccaaatcctaaaggattctgtgacttgaaaggtaagtacgtccaaatacctaccacttgtgctaatgacccagtgggttttacacttagaaacacagtctgtaccgtctgcggaatgtggaaaggttatggctgtagttgtgaccaactccgcgaacccttgatgcagtctgcggatgcatcaacgtttttaaacgggtttgcggtgtaagtgcagcccgtcttacaccgtgcggcacaggcactagtactgatgtcgtctacagggcttttgatatttacaacgaaaaagttgctggttttgcaaagttcctaaaaactaattgctgtcgcttccaggagaaggatgaggaaggcaatttattagactcttactttgtagttaagaggcatactatgtctaactaccaacatgaagagactatttataacttggttaaagattgtccagcggttgctgtccatgactttttcaagtttagagtagatggtgacatggtaccacatatatcacgtcagcgtctaactaaatacacaatggctgatttagtctatgctctacgtcattttgatgagggtaattgtgatacattaaaagaaatactcgtcacatacaattgctgtgatgatgattatttcaataagaaggattggtatgacttcgtagagaatcctgacatcttacgcgtatatgctaacttaggtgagcgtgtacgccaatcattattaaagactgtacaattctgcgatgctatgcgtgatgcaggcattgtaggcgtactgacattagataatcaggatcttaatgggaactggtacgatttcggtgatttcgtacaagtagcaccaggctgcggagttcctattgtggattcatattactcattgctgatgcccatcctcactttgactagggcattggctgctgagtcccatatggatgctgatctcgcaaaaccacttattaagtgggatttgctgaaatatgattttacggaagagagactttgtctcttcgaccgttattttaaatattgggaccagacataccatcccaattgtattaactgtttggatgataggtgtatccttcattgtgcaaactttaatgtgttattttctactgtgtttccacctacaagttttggaccactagtaagaaaaatatttgtagatggtgttccttttgttgtttcaactggataccattttcgtgagttaggagtcgtacataatcaggatgtaaacttacatagctcgcgtctcagtttcaaggaacttttagtgtatgctgctgatccagctatgcatgcagcttctggcaatttattgctagataaacgcactacatgcttttcagtagctgcactaacaaacaatgttgcttttcaaactgtcaaacccggtaattttaataaagacttttatgactttgctgtgtctaaaggtttctttaaggaaggaagttctgttgaactaaaacacttcttctttgctcaggatggcaacgctgctatcagtgattatgactattatcgttataatctgccaacaatgtgtgatatcagacaactcctattcgtagttgaagttgttgataaatactttgattgttacgatggtggctgtattaatgccaaccaagtaatcgttaacaatctggataaatcagctggtttcccatttaataaatggggtaaggctagactttattatgactcaatgagttatgaggatcaagatgcacttttcgcgtatactaagcgtaatgtcatccctactataactcaaatgaatcttaagtatgccattagtgcaaagaatagagctcgcaccgtagctggtgtctctatctgtagtactatgacaaatagacagtttcatcagaaattattgaagtcaatagccgccactagaggagctactgtggtaattggaacaagcaagttttacggtggctggcataatatgttaaaaactgtttacagtgatgtagaaactccacaccttatgggttgggattatccaaaatgtgacagagccatgcctaacatgcttaggataatggcctctcttgttcttgctcgcaaacataacacttgctgtaacttatcacaccgtttctacaggttagctaacgagtgtgcgcaagtattaagtgagatggtcatgtgtggcggctcactatatgttaaaccaggtggaacatcatccggtgatgctacaactgcttatgctaatagtgtctttaacatttgtcaagctgttacagccaatgtaaatgcacttctttcaactgatggtaataagatagctgacaagtatgtccgcaatctacaacacaggctctatgagtgtctctatagaaatagggatgttgatcatgaattcgtggatgagttttacgcttacctgcgtaaacatttctccatgatgattctttctgatgatgccgttgtgtgctataacagtaactatgcggctcaaggtttagtagctagcattaagaactttaaggcagttctttattatcaaaataatgtgttcatgtctgaggcaaaatgttggactgagactgaccttactaaaggacctcacgaattttgctcacagcatacaatgctagttaaacaaggagatgattacgtgtacctgccttacccagatccatcaagaatattaggcgcaggctgttttgtcgatgatattgtcaaaacagatggtacacttatgattgaaaggttcgtgtcactggctattgatgcttacccacttacaaaacatcctaatcaggagtatgctgatgtctttcacttgtatttacaatacattagaaagttacatgatgagcttactggccacatgttggacatgtattccgtaatgctaactaatgataacacctcacggtactgggaacctgagttttatgaggctatgtacacaccacatacagtcttgcaggctgtaggtgcttgtgtattgtgcaattcacagacttcacttcgttgcggtgcctgtattaggagaccattcctatgttgcaagtgctgctatgaccatgtcatttcaacatcacacaaattagtgttgtctgttaatccctatgtttgcaatgccccaggttgtgatgtcactgatgtgacacaactgtatctaggaggtatgagctattattgcaagtcacataagcctcccattagttttccattatgtgctaatggtcaggtttttggtttatacaaaaacacatgtgtaggcagtgacaatgtcactgacttcaatgcgatagcaacatgtgattggactaatgctggcgattacatacttgccaacacttgtactgagagactcaagcttttcgcagcagaaacgctcaaagccactgaggaaacatttaagctgtcatatggtattgccactgtacgcgaagtactctctgacagagaattgcatctttcatgggaggttggaaaacctagaccaccattgaacagaaactatgtctttactggttaccgtgtaactaaaaatagtaaagtacagattggagagtacacctttgaaaaaggtgactatggtgatgctgttgtgtacagaggtactacgacatacaagttgaatgttggtgattactttgtgttgacatctcacactgtaatgccacttagtgcacctactctagtgccacaagagcactatgtgagaattactggcttgtacccaacactcaacatctcagatgagttttctagcaatgttgcaaattatcaaaaggtcggcatgcaaaagtactctacactccaaggaccacctggtactggtaagagtcattttgccatcggacttgctctctattacccatctgctcgcatagtgtatacggcatgctctcatgcagctgttgatgccctatgtgaaaaggcattaaaatatttgcccatagataaatgtagtagaatcatacctgcgcgtgcgcgcgtagagtgttttgataaattcaaagtgaattcaacactagaacagtatgttttctgcactgtaaatgcattgccagaaacaactgctgacattgtagtctttgatgaaatctctatggctactaattatgacttgagtgttgtcaatgctagacttcgtgcaaaacactacgtctatattggcgatcctgctcaattaccagccccccgcacattgctgactaaaggcacactagaaccagaatattttaattcagtgtgcagacttatgaaaacaataggtccagacatgttccttggaacttgtcgccgttgtcctgctgaaattgttgacactgtgagtgctttagtttatgacaataagctaaaagcacacaaggataagtcagctcaatgcttcaaaatgttctacaaaggtgttattacacatgatgtttcatctgcaatcaacagacctcaaataggcgttgtaagagaatttcttacacgcaatcctgcttggagaaaagctgtttttatctcaccttataattcacagaacgctgtagcttcaaaaatcttaggattgcctacgcagactgttgattcatcacagggttctgaatatgactatgtcatattcacacaaactactgaaacagcacactcttgtaatgtcaaccgcttcaatgtggctatcacaagggcaaaaattggcattttgtgcataatgtctgatagagatctttatgacaaactgcaatttacaagtctagaaataccacgtcgcaatgtggctacattacaagcagaaaatgtaactggactttttaaggactgtagtaagatcattactggtcttcatcctacacaggcacctacacacctcagcgttgatataaagttcaagactgaaggattatgtgttgacataccaggcataccaaaggacatgacctaccgtagactcatctctatgatgggtttcaaaatgaattaccaagtcaatggttaccctaatatgtttatcacccgcgaagaagctattcgtcacgttcgtgcgtggattggctttgatgtagagggctgtcatgcaactagagatgctgtgggtactaacctacctctccagctaggattttctacaggtgttaacttagtagctgtaccgactggttatgttgacactgaaaataacacagaattcaccagagttaatgcaaaacctccaccaggtgaccagtttaaacatcttataccactcatgtataaaggcttgccctggaatgtagtgcgtattaagatagtacaaatgctcagtgatacactgaaaggattgtcagacagagtcgtgttcgtcctttgggcgcatggctttgagcttacatcaatgaagtactttgtcaagattggacctgaaagaacgtgttgtctgtgtgacaaacgtgcaacttgcttttctacttcatcagatacttatgcctgctggaatcattctgtgggttttgactatgtctataacccatttatgattgatgttcagcagtggggctttacgggtaaccttcagagtaaccatgaccaacattgccaggtacatggaaatgcacatgtggctagttgtgatgctatcatgactagatgtttagcagtccatgagtgctttgttaagcgcgttgattggtctgttgaataccctattataggagatgaactgagggttaattctgcttgcagaaaagtacaacacatggttgtgaagtctgcattgcttgctgataagtttccagttcttcatgacattggaaatccaaaggctatcaagtgtgtgcctcaggctgaagtagaatggaagttctacgatgctcagccatgtagtgacaaagcttacaaaatagaggaactcttctattcttatgctacacatcacgataaattcactgatggtgtttgtttgttttggaattgtaacgttgatcgttacccagccaatgcaattgtgtgtaggtttgacacaagagtcttgtcaaacttgaacttaccaggctgtgatggtggtagtttgtatgtgaataagcatgcattccacactccagctttcgataaaagtgcatttactaatttaaagcaattgcctttcttttactattctgatagtccttgtgagtctcatggcaaacaagtagtgtcggatattgattatgttccactcaaatctgctacgtgtattacacgatgcaatttaggtggtgctgtttgcagacaccatgcaaatgagtaccgacagtacttggatgcatataatatgatgatttctgctggatttagcctatggatttacaaacaatttgatacttataacctgtggaatacatttaccaggttacagagtttagaaaatgtggcttataatgttgttaataaaggacactttgatggacacgccggcgaagcacctgtttccatcattaataatgctgtttacacaaaggtagatggtattgatgtggagatctttgaaaataagacaacacttcctgttaatgttgcatttgagctttgggctaagcgtaacattaaaccagtgccagagattaagatactcaataatttgggtgttgatatcgctgctaatactgtaatctgggactacaaaagagaagccccagcacatgtatctacaataggtgtctgcacaatgactgacattgccaagaaacctactgagagtgcttgttcttcacttactgtcttgtttgatggtagagtggaaggacaggtagacctttttagaaacgcccgtaatggtgttttaataacagaaggttcagtcaaaggtctaacaccttcaaagggaccagcacaagctagcgtcaatggagtcacattaattggagaatcagtaaaaacacagtttaactactttaagaaagtagacggcattattcaacagttgcctgaaacctactttactcagagcagagacttagaggattttaagcccagatcacaaatggaaactgactttctcgagctcgctatggatgaattcatacagcgatataagctcgagggctatgccttcgaacacatcgtttatggagatttcagtcatggacaacttggcggtcttcatttaatgataggcttagccaagcgctcacaagattcaccacttaaattagaggattttatccctatggacagcacagtgaaaaattacttcataacagatgcgcaaacaggttcatcaaaatgtgtgtgttctgtgattgatcttttacttgatgactttgtcgagataataaagtcacaagatttgtcagtgatttcaaaagtggtcaaggttacaattgactatgctgaaatttcattcatgctttggtgtaaggatggacatgttgaaaccttctacccaaaactacaagcaagtcaagcgtggcaaccaggtgttgcgatgcctaacttgtacaagatgcaaagaatgcttcttgaaaagtgtgaccttcagaattatggtgaaaatgctgttataccaaaaggaataatgatgaatgtcgcaaagtatactcaactgtgtcaatacttaaatacacttactttagctgtaccctacaacatgagagttattcactttggtgctggctctgataaaggagttgcaccaggtacagctgtgctcagacaatggttgccaactggcacactacttgtcgattcagatcttaatgacttcgtctccgacgcagattctactttaattggagactgtgcaacagtacatacggctaataaatgggaccttattattagcgatatgtatgaccctaggaccaaacatgtgacaaaagagaatgactctaaagaagggtttttcacttatctgtgtggatttataaagcaaaaactagccctgggtggttctatagctgtaaagataacagagcattcttggaatgctgacctttacaagcttatgggccatttctcatggtggacagcttttgttacaaatgtaaatgcatcatcatcggaagcatttttaattggggctaactatcttggcaagccgaaggaacaaattgatggctataccatgcatgctaactacattttctggaggaacacaaatcctatccagttgtcttcctattcactctttgacatgagcaaatttcctcttaaattaagaggaactgctgtaatgtctcttaaggagaatcaaatcaatgatatgatttattctcttctggaaaaaggtaggcttatcattagagaaaacaacagagttgtggtttcaagtgatattcttgttaacaactaaacgaacatgtttattttcttattatttcttactctcactagtggtagtgaccttgaccggtgcaccacttttgatgatgttcaagctcctaattacactcaacatacttcatctatgaggggggtttactatcctgatgaaatttttagatcagacactctttatttaactcaggatttatttcttccattttattctaatgttacagggtttcatactattaatcatacgtttggcaaccctgtcataccttttaaggatggtatttattttgctgccacagagaaatcaaatgttgtccgtggttgggtttttggttctaccatgaacaacaagtcacagtcggtgattattattaacaattctactaatgttgttatacgagcatgtaactttgaattgtgtgacaaccctttctttgctgtttctaaacccatgggtacacagacacatactatgatattcgataatgcatttaattgcactttcgagtacatatctgatgccttttcgcttgatgtttcagaaaagtcaggtaattttaaacacttacgagagtttgtgtttaaaaataaagatgggtttctctatgtttataagggctatcaacctatagatgtagttcgtgatctaccttctggttttaacactttgaaacctatttttaagttgcctcttggtattaacattacaaattttagagccattcttacagccttttcacctgctcaagacatttggggcacgtcagctgcagcctattttgttggctatttaaagccaactacatttatgctcaagtatgatgaaaatggtacaatcacagatgctgttgattgttctcaaaatccacttgctgaactcaaatgctctgttaagagctttgagattgacaaaggaatttaccagacctctaatttcagggttgttccctcaggagatgttgtgagattccctaatattacaaacttgtgtccttttggagaggtttttaatgctactaaattcccttctgtctatgcatgggagagaaaaaaaatttctaattgtgttgctgattactctgtgctctacaactcaacatttttttcaacctttaagtgctatggcgtttctgccactaagttgaatgatctttgcttctccaatgtctatgcagattcttttgtagtcaagggagatgatgtaagacaaatagcgccaggacaaactggtgttattgctgattataattataaattgccagatgatttcatgggttgtgtccttgcttggaatactaggaacattgatgctacttcaactggtaattataattataaatataggtatcttagacatggcaagcttaggccctttgagagagacatatctaatgtgcctttctcccctgatggcaaaccttgcaccccacctgctcttaattgttattggccattaaatgattatggtttttacaccactactggcattggctaccaaccttacagagttgtagtactttcttttgaacttttaaatgcaccggccacggtttgtggaccaaaattatccactgaccttattaagaaccagtgtgtcaattttaattttaatggactcactggtactggtgtgttaactccttcttcaaagagatttcaaccatttcaacaatttggccgtgatgtttctgatttcactgattccgttcgagatcctaaaacatctgaaatattagacatttcaccttgcgcttttgggggtgtaagtgtaattacacctggaacaaatgcttcatctgaagttgctgttctatatcaagatgttaactgcactgatgtttctacagcaattcatgcagatcaactcacaccagcttggcgcatatattctactggaaacaatgtattccagactcaagcaggctgtcttataggagctgagcatgtcgacacttcttatgagtgcgacattcctattggagctggcatttgtgctagttaccatacagtttctttattacgtagtactagccaaaaatctattgtggcttatactatgtctttaggtgctgatagttcaattgcttactctaataacaccattgctatacctactaacttttcaattagcattactacagaagtaatgcctgtttctatggctaaaacctccgtagattgtaatatgtacatctgcggagattctactgaatgtgctaatttgcttctccaatatggtagcttttgcacacaactaaatcgtgcactctcaggtattgctgctgaacaggatcgcaacacacgtgaagtgttcgctcaagtcaaacaaatgtacaaaaccccaactttgaaatattttggtggttttaatttttcacaaatattacctgaccctctaaagccaactaagaggtcttttattgaggacttgctctttaataaggtgacactcgctgatgctggcttcatgaagcaatatggcgaatgcctaggtgatattaatgctagagatctcatttgtgcgcagaagttcaatggacttacagtgttgccacctctgctcactgatgatatgattgctgcctacactgctgctctagttagtggtactgccactgctggatggacatttggtgctggcgctgctcttcaaataccttttgctatgcaaatggcatataggttcaatggcattggagttacccaaaatgttctctatgagaaccaaaaacaaatcgccaaccaatttaacaaggcgattagtcaaattcaagaatcacttacaacaacatcaactgcattgggcaagctgcaagacgttgttaaccagaatgctcaagcattaaacacacttgttaaacaacttagctctaattttggtgcaatttcaagtgtgctaaatgatatcctttcgcgacttgataaagtcgaggcggaggtacaaattgacaggttaattacaggcagacttcaaagccttcaaacctatgtaacacaacaactaatcagggctgctgaaatcagggcttctgctaatcttgctgctactaaaatgtctgagtgtgttcttggacaatcaaaaagagttgacttttgtggaaagggctaccaccttatgtccttcccacaagcagccccgcatggtgttgtcttcctacatgtcacgtatgtgccatcccaggagaggaacttcaccacagcgccagcaatttgtcatgaaggcaaagcatacttccctcgtgaaggtgtttttgtgtttaatggcacttcttggtttattacacagaggaacttcttttctccacaaataattactacagacaatacatttgtctcaggaaattgtgatgtcgttattggcatcattaacaacacagtttatgatcctctgcaacctgagcttgactcattcaaagaagagctggacaagtacttcaaaaatcatacatcaccagatgttgatcttggcgacatttcaggcattaacgcttctgtcgtcaacattcaaaaagaaattgaccgcctcaatgaggtcgctaaaaatttaaatgaatcactcattgaccttcaagaattgggaaaatatgagcaatatattaaatggccttggtatgtttggctcggcttcattgctggactaattgccatcgtcatggttacaatcttgctttgttgcatgactagttgttgcagttgcctcaagggtgcatgctcttgtggttcttgctgcaagtttgatgaggatgactctgagccagttctcaagggtgtcaaattacattacacataaacgaacttatggatttgtttatgagattttttactcttagatcaattactgcacagccagtaaaaattgacaatgcttctcctgcaagtactgttcatgctacagcaacgataccgctacaagcctcactccctttcggatggcttgttattggcgttgcatttcttgctgtttttcagagcgctaccaaaataattgcgctcaataaaagatggcagctagccctttataagggcttccagttcatttgcaatttactgctgctatttgttaccatctattcacatcttttgcttgtcgctgcaggtatggaggcgcaatttttgtacctctatgccttgatatattttctacaatgcatcaacgcatgtagaattattatgagatgttggctttgttggaagtgcaaatccaagaacccattactttatgatgccaactactttgtttgctggcacacacataactatgactactgtataccatataacagtgtcacagatacaattgtcgttactgaaggtgacggcatttcaacaccaaaactcaaagaagactaccaaattggtggttattctgaggataggcactcaggtgttaaagactatgtcgttgtacatggctatttcaccgaagtttactaccagcttgagtctacacaaattactacagacactggtattgaaaatgctacattcttcatctttaacaagcttgttaaagacccaccgaatgtgcaaatacacacaatcgacggctcttcaggagttgctaatccagcaatggatccaatttatgatgagccgacgacgactactagcgtgcctttgtaagcacaagaaagtgagtacgaacttatgtactcattcgtttcggaagaaacaggtacgttaatagttaatagcgtacttctttttcttgctttcgtggtattcttgctagtcacactagccatccttactgcgcttcgattgtgtgcgtactgctgcaatattgttaacgtgagtttagtaaaaccaacggtttacgtctactcgcgtgttaaaaatctgaactcttctgaaggagttcctgatcttctggtctaaacgaactaactattattattattctgtttggaactttaacattgcttatcatggcagacaacggtactattaccgttgaggagcttaaacaactcctggaacaatggaacctagtaataggtttcctattcctagcctggattatgttactacaatttgcctattctaatcggaacaggtttttgtacataataaagcttgttttcctctggctcttgtggccagtaacacttgcttgttttgtgcttgctgctgtctacagaattaattgggtgactggcgggattgcgattgcaatggcttgtattgtaggcttgatgtggcttagctacttcgttgcttccttcaggctgtttgctcgtacccgctcaatgtggtcattcaacccagaaacaaacattcttctcaatgtgcctctccgggggacaattgtgaccagaccgctcatggaaagtgaacttgtcattggtgctgtgatcattcgtggtcacttgcgaatggccggacactccctagggcgctgtgacattaaggacctgccaaaagagatcactgtggctacatcacgaacgctttcttattacaaattaggagcgtcgcagcgtgtaggcactgattcaggttttgctgcatacaaccgctaccgtattggaaactataaattaaatacagaccacgccggtagcaacgacaatattgctttgctagtacagtaagtgacaacagatgtttcatcttgttgacttccaggttacaatagcagagatattgattatcattatgaggactttcaggattgctatttggaatcttgacgttataataagttcaatagtgagacaattatttaagcctctaactaagaagaattattcggagttagatgatgaagaacctatggagttagattatccataaaacgaacatgaaaattattctcttcctgacattgattgtatttacatcttgcgagctatatcactatcaggagtgtgttagaggtacgactgtactactaaaagaaccttgcccatcaggaacatacgagggcaattcaccatttcaccctcttgctgacaataaatttgcactaacttgcactagcacacactttgcttttgcttgtgctgacggtactcgacatacctatcagctgcgtgcaagatcagtttcaccaaaacttttcatcagacaagaggaggttcaacaagagctctactcgccactttttctcattgttgctgctctagtatttttaatactttgcttcaccattaagagaaagacagaatgaatgagctcactttaattgacttctatttgtgctttttagcctttctgctattccttgttttaataatgcttattatattttggttttcactcgaaatccaggatctagaagaaccttgtaccaaagtctaaacgaacatgaaacttctcattgttttgacttgtatttctctatgcagttgcatatgcactgtagtacagcgctgtgcatctaataaacctcatgtgcttgaagatccttgtaaggtacaacactaggggtaatacttatagcactgcttggctttgtgctctaggaaaggttttaccttttcatagatggcacactatggttcaaacatgcacacctaatgttactatcaactgtcaagatccagctggtggtgcgcttatagctaggtgttggtaccttcatgaaggtcaccaaactgctgcatttagagacgtacttgttgttttaaataaacgaacaaattaaaatgtctgataatggaccccaatcaaaccaacgtagtgccccccgcattacatttggtggacccacagattcaactgacaataaccagaatggaggacgcaatggggcaaggccaaaacagcgccgaccccaaggtttacccaataatactgcgtcttggttcacagctctcactcagcatggcaaggaggaacttagattccctcgaggccagggcgttccaatcaacaccaatagtggtccagatgaccaaattggctactaccgaagagctacccgacgagttcgtggtggtgacggcaaaatgaaagagctcagccccagatggtacttctattacctaggaactggcccagaagcttcacttccctacggcgctaacaaagaaggcatcgtatgggttgcaactgagggagccttgaatacacccaaagaccacattggcacccgcaatcctaataacaatgctgccaccgtgctacaacttcctcaaggaacaacattgccaaaaggcttctacgcagagggaagcagaggcggcagtcaagcctcttctcgctcctcatcacgtagtcgcggtaattcaagaaattcaactcctggcagcagtaggggaaattctcctgctcgaatggctagcggaggtggtgaaactgccctcgcgctattgctgctagacagattgaaccagcttgagagcaaagtttctggtaaaggccaacaacaacaaggccaaactgtcactaagaaatctgctgctgaggcatctaaaaagcctcgccaaaaacgtactgccacaaaacagtacaacgtcactcaagcatttgggagacgtggtccagaacaaacccaaggaaatttcggggaccaagacctaatcagacaaggaactgattacaaacattggccgcaaattgcacaatttgctccaagtgcctctgcattctttggaatgtcacgcattggcatggaagtcacaccttcgggaacatggctgacttatcatggagccattaaattggatgacaaagatccacaattcaaagacaacgtcatactgctgaacaagcacattgacgcatacaaaacattcccaccaacagagcctaaaaaggacaaaaagaaaaagactgatgaagctcagcctttgccgcagagacaaaagaagcagcccactgtgactcttcttcctgcggctgacatggatgatttctccagacaacttcaaaattccatgagtggagcttctgctgattcaactcaggcataaacactcatgatgaccacacaaggcagatgggctatgtaaacgttttcgcaattccgtttacgatacatagtctactcttgtgcagaatgaattctcgtaactaaacagcacaagtaggtttagttaactttaatctcacatagcaatctttaatcaatgtgtaacattagggaggacttgaaagagccaccacattttcatcgaggccacgcggagtacgatcgagggtacagtgaataatgctagggagagctgcctatatggaagagccctaatgtgtaaaattaattttagtagtgctatccccatgtgattttaatagcttcttaggagaatgacaaaaaaaaaaaaaaaaaaaaaaaa

SEQ ID NO: 18 - DNA, 29751 bp, Unknown
  Description of Unknown: SARS coronavirus Tor2 sequence
ttttttttttttttttttttttttgtcattctcctaagaagctattaaaatcacatggggatagcactactaaaattaattttacacattagggctcttccatataggcagctctccctagcattattcactgtaccctcgatcgtactccgcgtggcctcgatgaaaatgtggtggctctttcaagtcctccctaatgttacacattgattaaagattgctatgtgagattaaagttaactaaacctacttgtgctgtttagttacgagaattcattctgcacaagagtagactatgtatcgtaaacggaattgcgaaaacgtttacatagcccatctgccttgtgtggtcatcatgagtgtttatgcctgagttgaatcagcagaagctccactcatggaattttgaagttgtctggagaaatcatccatgtcagccgcaggaagaagagtcacagtgggctgcttcttttgtctctgcggcaaaggctgagcttcatcagtctttttctttttgtcctttttaggctctgttggtgggaatgttttgtatgcgtcaatgtgcttgttcagcagtatgacgttgtctttgaattgtggatctttgtcatccaatttaatggctccatgataagtcagccatgttcccgaaggtgtgacttccatgccaatgcgtgacattccaaagaatgcagaggcacttggagcaaattgtgcaatttgcggccaatgtttgtaatcagttccttgtctgattaggtcttggtccccgaaatttccttgggtttgttctggaccacgtctcccaaatgcttgagtgacgttgtactgttttgtggcagtacgtttttggcgaggctttttagatgcctcagcagcagatttcttagtgacagtttggccttgttgttgttggcctttaccagaaactttgctctcaagctggttcaatctgtctagcagcaatagcgcgagggcagtttcaccacctccgctagccattcgagcaggagaatttcccctactgctgccaggagttgaatttcttgaattaccgcgactacgtgatgaggagcgagaagaggcttgactgccgcctctgcttccctctgcgtagaagccttttggcaatgttgttccttgaggaagttgtagcacggtggcagcattgttattaggattgcgggtgccaatgtggtctttgggtgtattcaaggctccctcagttgcaacccatacgatgccttctttgttagcgccgtagggaagtgaagcttctgggccagttcctaggtaatagaagtaccatctggggctgagctctttcattttgccgtcaccaccacgaactcgtcgggtagctcttcggtagtagccaatttggtcatctggaccactattggtgttgattggaacgccctggcctcgagggaatctaagttcctccttgccatgctgagtgagagctgtgaaccaagacgcagtattattgggtaaaccttggggtcggcgctgttttggccttgccccattgcgtcctccattctggttattgtcagttgaatctgtgggtccaccaaatgtaatgcggggggcactacgttggtttgattggggtccattatcagacattttaatttgttcgtttatttaaaacaacaagtacgtctctaaatgcagcagtttggtgaccttcatgaaggtaccaacacctagctataagcgcaccaccagctggatcttgacagttgatagtaacattaggtgtgcatgtttgaaccatagtgtgccatctatgaaaaggtaaaacctttcctagagcacaaagccaagcagtgctataagtattacccctagtgttgtaccttacaaggatcttcaagcacatgaggtttattagatgcacagcgctgtactacagtgcatatgcaactgcatagagaaatacaagtcaaaacaatgagaagtttcatgttcgtttagactttggtacaaggttcttctagatcctggatttcgagtgaaaaccaaaatataataagcattattaaaacaaggaatagcagaaaggctaaaaagcacaaatagaagtcaattaaagtgagctcattcattctgtctttctcttaatggtgaagcaaagtattaaaaatactagagcagcaacaatgagaaaaagtggcgagtagagctcttgttgaacctcctcttgtctgatgaaaagttttggtgaaactgatcttgcacgcagctgataggtatgtcgagtaccgtcagcacaagcaaaagcaaagtgtgtgctagtgcaagttagtgcaaatttattgtcagcaagagggtgaaatggtgaattgccctcgtatgttcctgatgggcaaggttcttttagtagtacagtcgtacctctaacacactcctgatagtgatatagctcgcaagatgtaaatacaatcaatgtcaggaagagaataattttcatgttcgttttatggataatctaactccataggttcttcatcatctaactccgaataattcttcttagttagaggcttaaataattgtctcactattgaacttattataacgtcaagattccaaatagcaatcctgaaagtcctcataatgataatcaatatctctgctattgtaacctggaagtcaacaagatgaaacatctgttgtcacttactgtactagcaaagcaatattgtcgttgctaccggcgtggtctgtatttaatttatagtttccaatacggtagcggttgtatgcagcaaaacctgaatcagtgcctacacgctgcgacgctcctaatttgtaataagaaagcgttcgtgatgtagccacagtgatctcttttggcaggtccttaatgtcacagcgccctagggagtgtccggccattcgcaagtgaccacgaatgatcacagcaccaatgacaagttcactttccatgagcggtctggtcacaattgtcccccggagaggcacattgagaagaatgtttgtttctgggttgaatgaccacattgagcgggtacgagcaaacagcctgaaggaagcaacgaagtagctaagccacatcaagcctacaatacaagccattgcaatcgcaatcccgccagtcacccaattaattctgtagacagcagcaagcacaaaacaagcaagtgttactggccacaagagccagaggaaaacaagctttattatgtacaaaaacctgttccgattagaataggcaaattgtagtaacataatccaggctaggaataggaaacctattactaggttccattgttccaggagttgtttaagctcctcaacggtaatagtaccgttgtctgccatgataagcaatgttaaagttccaaacagaataataataatagttagttcgtttagaccagaagatcaggaactccttcagaagagttcagatttttaacacgcgagtagacgtaaaccgttggttttactaaactcacgttaacaatattgcagcagtacgcacacaatcgaagcgcagtaaggatggctagtgtgactagcaagaataccacgaaagcaagaaaaagaagtacgctattaactattaacgtacctgtttcttccgaaacgaatgagtacataagttcgtactcactttcttgtgcttacaaaggcacgctagtagtcgtcgtcggctcatcataaattggatccattgctggattagcaactcctgaagagccgtcgattgtgtgtatttgcacattcggtgggtctttaacaagcttgttaaagatgaagaatgtagcattttcaataccagtgtctgtagtaatttgtgtagactcaagctggtagtaaacttcggtgaaatagccatgtacaacgacatagtctttaacacctgagtgcctatcctcagaataaccaccaatttggtagtcttctttgagttttggtgttgaaatgccgtcaccttcagtaacgacaattgtatctgtgacactgttatatggtatacagtagtcatagttatgtgtgtgccagcaaacaaagtagttggcatcataaagtaatgggttcttggatttgcacttccaacaaagccaacatctcataataattctacatgcgttgatgcattgtagaaaatatatcaaggcatagaggtacaaaaattgcgcctccatacctgcagcgacaagcaaaagatgtgaatagatggtaacaaatagcagcagtaaattgcaaatgaactggaagcccttataaagggctagctgccatcttttattgagcgcaattattttggtagcgctctgaaaaacagcaagaaatgcaacgccaataacaagccatccgaaagggagtgaggcttgtagcggtatcgttgctgtagcatgaacagtacttgcaggagaagcattgtcaatttttactggctgtgcagtaattgatctaagagtaaaaaatctcataaacaaatccataagttcgtttatgtgtaatgtaatttgacacccttgagaactggctcagagtcatcctcatcaaacttgcagcaagaaccacaagagcatgcacccttgaggcaactgcaacaactagtcatgcaacaaagcaagattgtaaccatgacgatggcaattagtccagcaatgaagccgagccaaacataccaaggccatttaatatattgctcatattttcccaattcttgaaggtcaatgagtgattcatttaaatttttagcgacctcattgaggcggtcaatttctttttgaatgttgacgacagaagcgttaatgcctgaaatgtcgccaagatcaacatctggtgatgtatgatttttgaagtacttgtccagctcttctttgaatgagtcaagctcaggttgcagaggatcataaactgtgttgttaatgatgccaataacgacatcacaatttcctgagacaaatgtattgtctgtagtaattatttgtggagaaaagaagttcctctgtgtaataaaccaagaagtgccattaaacacaaaaacaccttcacgagggaagtatgctttgccttcatgacaaattgctggcgctgtggtgaagttcctctcctgggatggcacatacgtgacatgtaggaagacaacaccatgcggggctgcttgtgggaaggacataaggtggtagccctttccacaaaagtcaactctttttgattgtccaagaacacactcagacattttagtagcagcaagattagcagaagccctgatttcagcagccctgattagttgttgtgttacataggtttgaaggctttgaagtctgcctgtaattaacctgtcaatttgtacctccgcctcgactttatcaagtcgcgaaaggatatcatttagcacacttgaaattgcaccaaaattagagctaagttgtttaacaagtgtgtttaatgcttgagcattctggttaacaacgtcttgcagcttgcccaatgcagttgatgttgttgtaagtgattcttgaatttgactaatcgccttgttaaattggttggcgatttgtttttggttctcatagagaacattttgggtaactccaatgccattgaacctatatgccatttgcatagcaaaaggtatttgaagagcagcgccagcaccaaatgtccatccagcagtggcagtaccactaactagagcagcagtgtaggcagcaatcatatcatcagtgagcagaggtggcaacactgtaagtccattgaacttctgcgcacaaatgagatctctagcattaatatcacctaggcattcgccatattgcttcatgaagccagcatcagcgagtgtcaccttattaaagagcaagtcctcaataaaagacctcttagttggctttagagggtcaggtaatatttgtgaaaaattaaaaccaccaaaatatttcaaagttggggttttgtacatttgtttgacttgagcgaacacttcacgtgtgttgcgatcctgttcagcagcaatacctgagagtgcacgatttagttgtgtgcaaaagctaccatattggagaagcaaattagcacattcagtagaatctccgcagatgtacatattacaatctacggaggttttagccatagaaacaggcattacttctgtagtaatgctaattgaaaagttagtaggtatagcaatggtgttattagagtaagcaattgaactatcagcacctaaagacatagtataagccacaatagatttttggctagtactacgtaataaagaaactgtatggtaactagcacaaatgccagctccaataggaatgtcgcactcataagaagtgtcgacatgctcagctcctataagacagcctgcttgagtctggaatacattgtttccagtagaatatatgcgccaagctggtgtgagttgatctgcatgaattgctgtagaaacatcagtgcagttaacatcttgatatagaacagcaacttcagatgaagcatttgttccaggtgtaattacacttacacccccaaaagcgcaaggtgaaatgtctaatatttcagatgttttaggatctcgaacggaatcagtgaaatcagaaacatcacggccaaattgttgaaatggttgaaatctctttgaagaaggagttaacacaccagtaccagtgagtccattaaaattaaaattgacacactggttcttaataaggtcagtggataattttggtccacaaaccgtggccggtgcatttaaaagttcaaaagaaagtactacaactctgtaaggttggtagccaatgccagtagtggtgtaaaaaccataatcatttaatggccaataacaattaagagcaggtggggtgcaaggtttgccatcaggggagaaaggcacattagatatgtctctctcaaagggcctaagcttgccatgtctaagatacctatatttataattataattaccagttgaagtagcatcaatgttcctagtattccaagcaaggacacaacccatgaaatcatctggcaatttataattataatcagcaataacaccagtttgtcctggcgctatttgtcttacatcatctcccttgactacaaaagaatctgcatagacattggagaagcaaagatcattcaacttagtggcagaaacgccatagcacttaaaggttgaaaaaaatgttgagttgtagagcacagagtaatcagcaacacaattagaaattttttttctctcccatgcatagacagaagggaatttagtagcattaaaaacctctccaaaaggacacaagtttgtaatattagggaatctcacaacatctcctgagggaacaaccctgaaattagaggtctggtaaattcctttgtcaatctcaaagctcttaacagagcatttgagttcagcaagtggattttgagaacaatcaacagcatctgtgattgtaccattttcatcatacttgagcataaatgtagttggctttaaatagccaacaaaataggctgcagctgacgtgccccaaatgtcttgagcaggtgaaaaggctgtaagaatggctctaaaatttgtaatgttaataccaagaggcaacttaaaaataggtttcaaagtgttaaaaccagaaggtagatcacgaactacatctataggttgatagcccttataaacatagagaaacccatctttatttttaaacacaaactctcgtaagtgtttaaaattacctgacttttctgaaacatcaagcgaaaaggcatcagatatgtactcgaaagtgcaattaaatgcattatcgaatatcatagtatgtgtctgtgtacccatgggtttagaaacagcaaagaaagggttgtcacacaattcaaagttacatgctcgtataacaacattagtagaattgttaataataatcaccgactgtgacttgttgttcatggtagaaccaaaaacccaaccacggacaacatttgatttctctgtggcagcaaaataaataccatccttaaaaggtatgacagggttgccaaacgtatgattaatagtatgaaaccctgtaacattagaataaaatggaagaaataaatcctgagttaaataaagagtgtctgatctaaaaatttcatcaggatagtaaacccccctcatagatgaagtatgttgagtgtaattaggagcttgaacatcatcaaaagtggtgcaccggtcaaggtcactaccactagtgagagtaagaaataataagaaaataaacatgttcgtttagttgttaacaagaatatcacttgaaaccacaactctgttgttttctctaatgataagcctacctttttccagaagagaataaatcatatcattgatttgattctccttaagagacattacagcagttcctcttaatttaagaggaaatttgctcatgtcaaagagtgaataggaagacaactggataggatttgtgttcctccagaaaatgtagttagcatgcatggtatagccatcaatttgttccttcggcttgccaagatagttagccccaattaaaaatgcttccgatgatgatgcatttacatttgtaacaaaagctgtccaccatgagaaatggcccataagcttgtaaaggtcagcattccaagaatgctctgttatctttacagctatagaaccacccagggctagtttttgctttataaatccacacagataagtgaaaaacccttctttagagtcattctcttttgtcacatgtttggtcctagggtcatacatatcgctaataataaggtcccatttattagccgtatgtactgttgcacagtctccaattaaagtagaatctgcgtcggagacgaagtcattaagatctgaatcgacaagtagtgtgccagttggcaaccattgtctgagcacagctgtacctggtgcaactcctttatcagagccagcaccaaagtgaataactctcatgttgtagggtacagctaaagtaagtgtatttaagtattgacacagttgagtatactttgcgacattcatcattattccttttggtataacagcattttcaccataattctgaaggtcacacttttcaagaagcattctttgcatcttgtacaagttaggcatcgcaacacctggttgccacgcttgacttgcttgtagttttgggtagaaggtttcaacatgtccatccttacaccaaagcatgaatgaaatttcagcatagtcaattgtaaccttgaccacttttgaaatcactgacaaatcttgtgactttattatctcgacaaagtcatcaagtaaaagatcaatcacagaacacacacattttgatgaacctgtttgcgcatctgttatgaagtaatttttcactgtgctgtccatagggataaaatcctctaatttaagtggtgaatcttgtgagcgcttggctaagcctatcattaaatgaagaccgccaagttgtccatgactgaaatctccataaacgatgtgttcgaaggcatagccctcgagcttatatcgctgtatgaattcatccatagcgagctcgagaaagtcagtttccatttgtgatctgggcttaaaatcctctaagtctctgctctgagtaaagtaggtttcaggcaactgttgaataatgccgtctactttcttaaagtagttaaactgtgtttttactgattctccaattaatgtgactccattgacgctagcttgtgctggtccctttgaaggtgttagacctttgactgaaccttctgttattaaaacaccattacgggcgtttctaaaaaggtctacctgtccttccactctaccatcaaacaagacagtaagtgaagaacaagcactctcagtaggtttcttggcaatgtcagtcattgtgcagacacctattgtagatacatgtgctggggcttctcttttgtagtcccagattacagtattagcagcgatatcaacacccaaattattgagtatcttaatctctggcactggtttaatgttacgcttagcccaaagctcaaatgcaacattaacaggaagtgttgtcttattttcaaagatctccacatcaataccatctacctttgtgtaaacagcattattaatgatggaaacaggtgcttcgccggcgtgtccatcaaagtgtcctttattaacaacattataagccacattttctaaactctgtaacctggtaaatgtattccacaggttataagtatcaaattgtttgtaaatccataggctaaatccagcagaaatcatcatattatatgcatccaagtactgtcggtactcatttgcatggtgtctgcaaacagcaccacctaaattgcatcgtgtaatacacgtagcagatttgagtggaacataatcaatatccgacactacttgtttgccatgagactcacaaggactatcagaatagtaaaagaaaggcaattgctttaaattagtaaatgcacttttatcgaaagctggagtgtggaatgcatgcttattcacatacaaactaccaccatcacagcctggtaagttcaagtttgacaagactcttgtgtcaaacctacacacaattgcattggctgggtaacgatcaacgttacaattccaaaacaaacaaacaccatcagtgaatttatcgtgatgtgtagcataagaatagaagagttcctctattttgtaagctttgtcactacatggctgagcatcgtagaacttccattctacttcagcctgaggcacacacttgatagcctttggatttccaatgtcatgaagaactggaaacttatcagcaagcaatgcagacttcacaaccatgtgttgtacttttctgcaagcagaattaaccctcagttcatctcctataatagggtattcaacagaccaatcaacgcgcttaacaaagcactcatggactgctaaacatctagtcatgatagcatcacaactagccacatgtgcatttccatgtacctggcaatgttggtcatggttactctgaaggttacccgtaaagccccactgctgaacatcaatcataaatgggttatagacatagtcaaaacccacagaatgattccagcaggcataagtatctgatgaagtagaaaagcaagttgcacgtttgtcacacagacaacacgttctttcaggtccaatcttgacaaagtacttcattgatgtaagctcaaagccatgcgcccaaaggacgaacacgactctgtctgacaatcctttcagtgtatcactgagcatttgtactatcttaatacgcactacattccagggcaagcctttatacatgagtggtataagatgtttaaactggtcacctggtggaggttttgcattaactctggtgaattctgtgttattttcagtgtcaacataaccagtcggtacagctactaagttaacacctgtagaaaatcctagctggagaggtaggttagtacccacagcatctctagttgcatgacagccctctacatcaaagccaatccacgcacgaacgtgacgaatagcttcttcgcgggtgataaacatattagggtaaccattgacttggtaattcattttgaaacccatcatagagatgagtctacggtaggtcatgtcctttggtatgcctggtatgtcaacacataatccttcagtcttgaactttatatcaacgctgaggtgtgtaggtgcctgtgtaggatgaagaccagtaatgatcttactacagtccttaaaaagtccagttacattttctgcttgtaatgtagccacattgcgacgtggtatttctagacttgtaaattgcagtttgtcataaagatctctatcagacattatgcacaaaatgccaatttttgcccttgtgatagccacattgaagcggttgacattacaagagtgtgctgtttcagtagtttgtgtgaatatgacatagtcatattcagaaccctgtgatgaatcaacagtctgcgtaggcaatcctaagatttttgaagctacagcgttctgtgaattataaggtgagataaaaacagcttttctccaagcaggattgcgtgtaagaaattctcttacaacgcctatttgaggtctgttgattgcagatgaaacatcatgtgtaataacacctttgtagaacattttgaagcattgagctgacttatccttgtgtgcttttagcttattgtcataaactaaagcactcacagtgtcaacaatttcagcaggacaacggcgacaagttccaaggaacatgtctggacctattgttttcataagtctgcacactgaattaaaatattctggttctagtgtgcctttagtcagcaatgtgcggggggctggtaattgagcaggatcgccaatatagacgtagtgttttgcacgaagtctagcattgacaacactcaagtcataattagtagccatagagatttcatcaaagactacaatgtcagcagttgtttctggcaatgcatttacagtgcagaaaacatactgttctagtgttgaattcactttgaatttatcaaaacactctacgcgcgcacgcgcaggtatgattctactacatttatctatgggcaaatattttaatgccttttcacatagggcatcaacagctgcatgagagcatgccgtatacactatgcgagcagatgggtaatagagagcaagtccgatggcaaaatgactcttaccagtaccaggtggtccttggagtgtagagtacttttgcatgccgaccttttgataatttgcaacattgctagaaaactcatctgagatgttgagtgttgggtacaagccagtaattctcacatagtgctcttgtggcactagagtaggtgcactaagtggcattacagtgtgagatgtcaacacaaagtaatcaccaacattcaacttgtatgtcgtagtacctctgtacacaacagcatcaccatagtcacctttttcaaaggtgtactctccaatctgtactttactatttttagttacacggtaaccagtaaagacatagtttctgttcaatggtggtctaggttttccaacctcccatgaaagatgcaattctctgtcagagagtacttcgcgtacagtggcaataccatatgacagcttaaatgtttcctcagtggctttgagcgtttctgctgcgaaaagcttgagtctctcagtacaagtgttggcaagtatgtaatcgccagcattagtccaatcacatgttgctatcgcattgaagtcagtgacattgtcactgcctacacatgtgtttttgtataaaccaaaaacctgaccattagcacataatggaaaactaatgggaggcttatgtgacttgcaataatagctcatacctcctagatacagttgtgtcacatcagtgacatcacaacctggggcattgcaaacatagggattaacagacaacactaatttgtgtgatgttgaaatgacatggtcatagcagcacttgcaacataggaatggtctcctaatacaggcaccgcaacgaagtgaagtctgtgaattgcacaatacacaagcacctacagcctgcaagactgtatgtggtgtgtacatagcctcataaaactcaggttcccagtaccgtgaggtgttatcattagttagcattacggaatacatgtccaacatgtggccagtaagctcatcatgtaactttctaatgtattgtaaatacaagtgaaagacatcagcatactcctgattaggatgttttgtaagtgggtaagcatcaatagccagtgacacgaacctttcaatcataagtgtaccatctgttttgacaatatcatcgacaaaacagcctgcgcctaatattcttgatggatctgggtaaggcaggtacacgtaatcatctccttgtttaactagcattgtatgctgtgagcaaaattcgtgaggtcctttagtaaggtcagtctcagtccaacattttgcctcagacatgaacacattattttgataataaagaactgccttaaagttcttaatgctagctactaaaccttgagccgcatagttactgttatagcacacaacggcatcatcagaaagaatcatcatggagaaatgtttacgcaggtaagcgtaaaactcatccacgaattcatgatcaacatccctatttctatagagacactcatagagcctgtgttgtagattgcggacatacttgtcagctatcttattaccatcagttgaaagaagtgcatttacattggctgtaacagcttgacaaatgttaaagacactattagcataagcagttgtagcatcaccggatgatgttccacctggtttaacatatagtgagccgccacacatgaccatctcacttaatacttgcgcacactcgttagctaacctgtagaaacggtgtgataagttacagcaagtgttatgtttgcgagcaagaacaagagaggccattatcctaagcatgttaggcatggctctgtcacattttggataatcccaacccataaggtgtggagtttctacatcactgtaaacagtttttaacatattatgccagccaccgtaaaacttgcttgttccaattaccacagtagctcctctagtggcggctattgacttcaataatttctgatgaaactgtctatttgtcatagtactacagatagagacaccagctacggtgcgagctctattctttgcactaatggcatacttaagattcatttgagttatagtagggatgacattacgcttagtatacgcgaaaagtgcatcttgatcctcataactcattgagtcataataaagtctagccttaccccatttattaaatgggaaaccagctgatttatccagattgttaacgattacttggttggcattaatacagccaccatcgtaacaatcaaagtatttatcaacaacttcaactacgaataggagttgtctgatatcacacattgttggcagattataacgataatagtcataatcactgatagcagcgttgccatcctgagcaaagaagaagtgttttagttcaacagaacttccttccttaaagaaacctttagacacagcaaagtcataaaagtctttattaaaattaccgggtttgacagtttgaaaagcaacattgtttgttagtgcagctactgaaaagcatgtagtgcgtttatctagcaataaattgccagaagctgcatgcatagctggatcagcagcatacactaaaagttccttgaaactgagacgcgagctatgtaagtttacatcctgattatgtacgactcctaactcacgaaaatggtatccagttgaaacaacaaaaggaacaccatctacaaatatttttcttactagtggtccaaaacttgtaggtggaaacacagtagaaaataacacattaaagtttgcacaatgaaggatacacctatcatccaaacagttaatacaattgggatggtatgtctggtcccaatatttaaaataacggtcgaagagacaaagtctctcttccgtaaaatcatatttcagcaaatcccacttaataagtggttttgcgagatcagcatccatatgggactcagcagccaatgccctagtcaaagtgaggatgggcatcagcaatgagtaatatgaatccacaataggaactccgcagcctggtgctacttgtacgaaatcaccgaaatcgtaccagttcccattaagatcctgattatctaatgtcagtacgcctacaatgcctgcatcacgcatagcatcgcagaattgtacagtctttaataatgattggcgtacacgctcacctaagttagcatatacgcgtaagatgtcaggattctctacgaagtcataccaatccttcttattgaaataatcatcatcacagcaattgtatgtgacgagtatttcttttaatgtatcacaattaccctcatcaaaatgacgtagagcatagactaaatcagccattgtgtatttagttagacgctgacgtgatatatgtggtaccatgtcaccatctactctaaacttgaaaaagtcatggacagcaaccgctggacaatctttaaccaagttataaatagtctcttcatgttggtagttagacatagtatgcctcttaactacaaagtaagagtctaataaattgccttcctcatccttctcctggaagcgacagcaattagtttttaggaactttgcaaaaccagcaactttttcgttgtaaatatcaaaagccctgtagacgacatcagtactagtgcctgtgccgcacggtgtaagacgggctgcacttacaccgcaaacccgtttaaaaacgttgatgcatccgcagactgcatcaagggttcgcggagttggtcacaactacagccataacctttccacattccgcagacggtacagactgtgtttctaagtgtaaaacccactgggtcattagcacaagtggtaggtatttggacgtacttacctttcaagtcacagaatcctttaggatttggatggtcaatgtggcatctacaatacagacaacatgaagcaccaccaaaggactcttggtccatgttagcttctggtgttacagtaattgcctgtcctgtaccagtgtgtgtacacaacatcttcacacagttggtgattggttgtcctccacttgctaggtaatccttatatgctttagcagggtctactgcaaaagcacagaaggaaagcacagttgaattggcaggtacttctgtagcatttccagcctgaagacgtactgtagcagctaaactgcccagcaccatacctctatttaggttgtttaagcctttgatgaagtacaagtatttcactttaggcccttttggtgtgtctgtaacaaacctacaaggtggttccagttctgtgtaaattgtacctgtaccatcactcttagggaatctagcccatttgagatcttggtggtctgatagtaatgccagcacaaacctacctcccttcgaattgttatagtaggcaagtgcattgtcatcagtacaagctgtttgtgtggtaccagccgcacaggacatctgtcgtagtgctactggactcagttcattattctgtagtttaacagctgagttggctcttagagctgtaacaataagaggccaagccaaatttggtgaattgtccatgttaatttcactaagttgaacaatcttgctatccgcatcaacaacttgctggatttcccagagtgcagatgcatatgtaaaggtgttaccatcacaagtgttcttgtaggtaccataatcagggacaacaaccatgagtttggctgctgtagtcaatggtatgatgttgagtggaacacaaccatcacgcgcattgttgataatgttgttaagtgcatcattatcaagcttcctaagcatagtgaagagcattgtttgcatagcactagttacttttgccctcttgtcctcagatcttgcctgtttgtacatttgggtcatagcctgatctgccatcttttccaacttgcgttgcatggcagcatcacggtcaaactcagatttagccacattcaaagatttctttaactttttgagaacgacttcagaatcaccattagctacagcctgctcataggcctcctgggcagtggcataagcggcatatgatggtaaagaactaaattctgaagcaatagcctgaagagtagcacggttatcgagcatttcctcgcacaacctattaatgtctacagcaccctgcatggatagcaaaacagacaaaagagaaaccatcttctcgaaagcttcagttgtgtcttttgcaagaagaatatcattgtggagttgtacacattgtgcccacaatttagaagatgactctactctaagttgttgaagaaccgagagcagtaccacagatgtgcactttacgtcagacattttagactgtacagtagcaaccttgatacatggtttacctccaatacccaacaacttaatgttaagcttgaaagcatcaatactactcttaggaggcaaaagcccctgggagttcatatacctaaattcttgtgtagagaccaagtagtcataaacaccaagagtaagcctgaagtaacggttgagtaaacagaaaaggccaaagtagcagcagcaacaatagcctaagaaacaataaacaagcatgatacactgtaaggtgttgccagtaataaataacaatgggtaatactcaacacacacaaacactatagctctagctaaaaacatgatagtcgtaacgacaccagaatagttagaggttacagaaataactaaggcccacatggaaatagcttgatctaaagcattaccatagtagactttgtaaacaagtgtaatgacattcatcagtgtccaaacacgtctagcagcatcatcataaacagtgcgagctgtcatgagaataagcaaaactaaagctgaagcatacataacacaatccttaagcctataaccagacaagctagtgtcagccaattcaagccatgtcatgatacgcatcacccagctagcaggcatgtagaccatattaaagtaagcaactgttgcaagagaaggtaacagaaacaagcacaagaatgcgtgcttatgcttaacaagcagcatagcacatgcagcaattgccataataccaagagtaaatggcaagaaagcattctcgtaaacaaagaaaaacagtgaccactgtgtactttgaacaagaatcaatagtgatgtcaagaaagttaaaagcatccaatgatgagtgcccttaacaattttcttgaacttaccttggaaggtaacaccagagcattgtctaacaacatcaaatggtgtaaactcatcttctaaaatagtgctaccaaggatagtacgaccattcataccattctgcagcagctctttcaaagcagcacacatatctaagacggcaattcctgtttgagcagaaagaggtcccaatatgtcaacatgatcttgtgtcaaaggttcatagttgtacttcattgccacaaggttaaagtcattcaaagtagtggtgaatctattaagaaaccacctatcaccattgataacagcagcatacagccatgccaaaacatttaatgttatggttgtgtctgtacctgcagcctgtgcagtttgtctgtcaacaaatggaccatagaatttaccttctaagtcagtaccagcgtgtactcctgttggaagctccatatgatgcatatagcagaaagacacgcaatcataatcaatgttaaaaccaacactaccacatgatccattaaggaaagaacctttaatggtatgattaggtctcatggcacactgataaacaccagatggtgaaccattgtagcatgctagaactgaaaatgtttgaccaggttggatacggacaaatttatacttgggtgtcttagggttagaagtatcaactttaagcctaagcagacaattttgcatagaatggccaataacacgaagttgaacattgccagcctgaacaagaaagctatggttggatttgcgaatgagcagatcttcatagttaggattaagcatgtcttctgctgtgcaaatgacatgtcttggacagtatactgtgtcatccaaccacaatccattaagagttgtagttccacaggttacttgtaccatgcacccttcaactttgcctgacgggaatgccattttcctaaaaccactctgcagaacagcagaagtgattgatgtctgtggtggttggtagagaacatcagcacctgagttgctaaagtcatttagagcctttgctaagtggcagcaagctgcttcacgatagctggtagtatctaaggctccactgaaatacttgtacttgttatatagagcaagatacctgttatactgtgtaagtggcaacagtgtctcgctacgcaattttaggtacatttccttgttgagcaaaaaggtacacaaagcagcctcctcgaaggtactaaatgtaactccattaaacatgactcttttcctaagatagttgttaaagaaccaatggcagtgcttcagagaaatacagaatacatagattgctgttatccaaaaaggcacaataggagaaaacatggcaaaccattgaaggtgagccaagaatgaaacatcattggtgaaatagaatgtcaagtacaagtaaaagactgagtagactcccggcagaaagctgtaagctggtaccagacagagtatagtgaaagacatcaaaaacaaaagtgcattagcagcaacaacatggttgtactcaccaaaaacacgtctgaatttcataaagtagtaggcagcacaagtcaccaatatggcaataataccaccagccactactgaagcagacacatctaaagcacccacaggttgcacaagaggagtaaagatgttagctatgagattcatcgcatcaacaccacagaaaactcctgatagagctctgtaatgctcattattaagaacccatctaccactggtagataggcaaatacctacttctgacctttcgcatgtaccatgtctacagtactcagcatcaaaagttgttactactctaacagaaccctccaggtaagtgttaggaaactgtatgatggaaccatccataagcacataacgagtgtctggacgaagctcactataagaaatagaaccctctagcaaattagtgtcataacaatatggcacaggtttgcccatagcatccttaaaaattgtacactcagcagcaagaacgcaagcagaggtagcaaaatcactatactcaatgagtttggaaggtgtgtagcaaatgttgccaacagcactaaaaacacgaggtagaaaatgcaagaagtcaccattgattgctctcagcacagtacccggtaagccaggcactatgaaaccaatctctcttgtaatgatagcagctactacagggcagcttttgtcatttttgtatgaaccaccacgctggctaaaccatgcgtcaaaaccagcatgtttatttgcaaaacaatcatcagtagaaatgatgtcacgagtgacaccatcctgaatggctttgtaaccaatgatttcatttgtgtaaccatcatggattgacaatgtatgtactggcataacgatataacaaaccaatgcagcaagaacgcacaataatgtggccttaagcataagtttaaaacaagtactaacaatcttaccacccttgagtgagattttagtagttatgacattgacaacctgtctagttgtagcacaagttagtctaaaaggtatgttgttcttcttggcagcactacgaatttgtttacgcagctgttcagataaagacatgtagtcttttacattccagatgagtgaaacattgtgactttttgctacttgggcattgatatgccttgcattacagtcaatacatgcgccaagatctctgggcgtcatgttttcaaccttattataggtgagcatgaaattgttacaactgtcacctgtcacttctaagtcagagtgatgtgaaagtttgagacattcaataacatcctttgtgtcaacatcggtatcaacaacaccttgtcgggcagctgacacgaatgtagaaaggacaccatctaaagctacaccctttgctaactcgctgtgagctgtagcaacaagtgccttaagtttttccataggaacactaaaagttgctgaaaaggtgtcgacataagcatcaaacatcttaacggaaacttcagtactatctccaacgtctgatacaagagcttggtcaagcaacagaataggttggcacatcagctgactgtagtacacagaagcagacttagaagcagactcgtcgcatttggacttgccatcaaaaactatgacattaataggcagtgaacctttagtgttgttagctctcaaattgtctaaattgacaaaatgggagagcggatgtctctcataggtcttttgaccagccttgtcaaagtagaggtgaagcgcgccatttttcacagcaacactatcaacaatatacgatgactggtcagtagggttgattggtcttttaaactggagtgacaaatcacgagcaacttcatcactaatgaatgtactaccagtgcaaaatgtgtcacaattgagacaattccaattgtgagtcttgcagaagccacggcctccatttgcatagacatagaaagatctcttcatgccattaacaatagttgtacactcaacgcgtgtggcacgattgcgcttatagcacatcatgcaagtcgaagaggtgcaaccatccatgatatgaacatagctcttccatatgtagtagaaagaagcaaagaagatgtacatcctaaccattgcagaaacgggtgccatttgtacaatactaatgataaaccacatgagccaagaattgctgatgaaatgactagcaaaatagccaaagaacacctgcattatagctgaaagacctaataaataaaagaattttgtgaacaacatatatgccaaaacccactcagcggccagacctaaaattgtcaagtctagcttgtacgatgaaatcgtcacctgaatggtttcaagagctggataagaatcaagggagtctaatccacttaaacaaatgctgcaaggaaaagaaccttcacagaaatccatagtagtaacgttagacgaattaagatacaattctctaacgccattacaataagaaggagcaccaaaattagataagagtacaccaaaagcagcagttacacagattagagaacctaagcaaatacttaacaacaatagccacatagcgattgtgaacaatttagaaaatttgggtgacttcacataattaatgccggcatccaaacataatttagcaacactcttaacactatttttagcaatagttgtaggtagtgaagctctaattctagaattggtacttttagtaaaagtacacaattggaacaataatgtaaacacataaggcatataattgttaaacacacgttgtgctaatctcttagcgcaatttgatgttgtaattgctgcttgtcctaagaatggtttgacataagccaaaattttactccaaggaacactattaattgcagcaataccatgagtggcaattgtttttaaacctaaggctagtgaaagctcattaggtttcttaatggtaatgcttgtgttttccacataagcagccataagatcctcatgacctaactcttgtgttactttaacaccttcatctgatggtttaagtatgacattgcctacaacttcggtagttttcacgtcacactctatgacttccttctgtatggtaggattttccactacttcttcagaggtgggttgttgactttcacaagcaagattgtccattccttgtgtgtcttctactgccagaacttcaaatgaatttgaagtatctactggctttgtactccaaagacaacgtaaacaccaagtgtttggtttgaacgttgtcttggttgtagcctggttaatgtgccaaacaattggcttatgcagtaatttagcacctttcttgaaactcgctgaatagtgtctatagtcaatagccactacatcgccattcaagtctgggaagaatgtgacagatagctctcgtgaagctggctttgtgaagcctgtcatttgatttaaatcatcagcaaattttgtgttagaacatgtgagtttgaaattatcaaaactcgcatttggtaatggttgagttggtacaaggtctataggctgctctgtatagtaagcattatcctttttataatacccatccaattttggttcaatctctgtgtaagtaactccatcgagtttatacgacacaggcttgatggttgtagtgtaagatgtttccttgtagaaaacatcagtcactggtcctttgtactctgacatctttgtaaggtgagctccgtcaatacgatagagggtctccttagcagttatatgagtgtaatgaccacactgatagttaccagtgtactcattcgcacataagaatgtaccttgctgtaatttatactcagcaggtggtgcagacatcataacaaaagaagactcttgttgtactagatattgtgtagcatcacgaccacacacacatggaatggaaacacctgtcttaagattatcataagatagagtacccatatacatcacagcttctacacccgttaaggtagtagttttctgaccacaatgtttacacaccacattaagaactcgctttgcagattccaaattagcatgctgtagaagatgggtcatagtttctctgacatcaccaagctcgccaacagttttattactgtaagcgagtatgagtgcacaaaagttagcagcatcaccagcacgggctctataataagcctcttgaagtgctggtgcattgaatttgacttcaagctgttgaagtgctaataaaacactagacaaataacaattgttatcagcccatttaattgaagttaaaccaccaacttgaggaaatttccatttctttgtgtggtttaaagcagacatgtacctaccaagaaaactctcatcaagagtatggtagtactcgaaagcttcactacgtagtgtgtcatcactaggtagtacaaagaaagtcttaccctcatgatttacatgaggtttaatttttgtaacatcagcaccatccaagtatgttggaccaaactgctgtccatatgtcatagacatatccacaagctgtgtgtggagattagtgttgtccacagttgtgaacacttttatagtcttaacctcccgcagggataagagactctttagtttgtcaagtgaaagaacctcaccgtcaagatgaaactcgacggggctctccagagtgtggtacacaattttgtcaccacgcttaagaaattcaacacctaactctgtacgctgtcctgaataggaccaatctctgtaagagccagccaaagaaactgtttctacaaagtgctcctcagatgtctttgatgacgaagtgaggtatccattatatgtagtaacagcatctggtgatgatactgacactacggcaggagctttaagagaacgcatacagcgcgcagcctcttcaagattaaaaccatgtgtcacataaccaattggcattgtgacaagcggctcatttagagagttcagcttcgtaataatagaagctacaggctctttactagtataaaagaagaatcggacaccatagtcaacgatgccctcttgaattttaattcctttatacttacgttggatggttgccattatggctctaacatccatgcatataggcattaattttcttgtctcttcagcatgagcaagcatttctctcaaattccaggatacagttcctagaatctcttccttagcattaggtgcttctgaaggtagtacataaaatgcagatttgcatttcttaagagcagtcttagcttcctcaagtgtataaccagcacatccttgtccagggtacgtggttatatactcatcaactggcactttcttcaaagctcttgagagcatctcagtagtgccaccagcctttttggagggtattacaacacaagtgatatcaccactagtgataacatcacctaccatgtaaggtgcatccttctcaaggaaagacatatcttcacctctaagcatgttctgagaatcatggtaaagcttaccattgatatcagcaaacaagagtaacttattggtaagaaacttagtttcttccagtgttgtggtaacctcatcaatgcaggccttaatttttggcttcacatcgacaggcttctgtacgacagatttctcctcagttttggaatcttctgtgtttggtggctcctcttgtttaggtgcttccactctaggcttcaggttatcaagataatccatgacaacctgctcataaagagctttgtcattgactgcaatataaacctgtgtacgaaccgtctgcacgcacacttgtaaagactgaagtggtttagcaccaaatatgcctgctgacaacaatggtgcaagtaagatgtcctgtgaattgaaattttcatatgctgccttaagaagctggatgtcctcacctgcatttaggttaggtccaacaacatgcagacacttcttagcaagattatgtccagaaagcaaacaagaccctcctactgtaagagggccatttagcttaatgtaatcatcactctccttttgcatggcaccattggttgccttgttgagtgcacctgctacaccaccaccatgtttcaggtgtatgttagcagcatttacaatcaccataggattagcactttgtgcctccttaacgatgtcaacacatttaatggcaacattgtcagtaagttttaaataaccagtaaactgattaactggttcttcaggtgtaggttctggttctggctcaatctctgattgctcagtagtatcatccagccagtcttcctcttcttcttcctcaactcgaactgtttcagctgaggcaccaaattccagagggagaccttgataatcatcctctgtaccgtactcatgttcacaggtttcatcaatttcttcttcctcacactctgcatcgtcctcttcttcctcatctggagggtaaaaggaacaatacatacgtgatgaaaagttttcttcaccagcatcatcaaataagtagaatgtagctacactccactcatcaagatcaatacccatgttggtaaggagatcagaaactggttgtaaagtcttcacaacagcctctgctacaacacatgcaaactcagtaacttcggtaccggattcaacagtgtagacagagcacttttcattaagcactttgtcaacacgttcatcaagctcaaatgtgattctcacattcttgtaaccttgaacttcccaaacagtatcttctccaaaggttacacctttaattggtgcacccccttttaagcgaaagacattgtttgtagccagtaaaccaggagacaatgcgcagtattgttctttgtccttaatctctaagagcatgaggccatttacacagactggtgtgccaacgatagctccatttgtgaagctatcaacgggcgtctcgagtgcttcgagttcaccgttcttgagaacaacctcctcagaggtaagtactgtgtcatgtgaatcaccttcaagaaaggttacttcttttggtgccttaagaggcatgagtagttgcagctgctccttgccacgtatacactgacggtaaagtcccttgctttgagcgatgaagacttcacctaagttgagtgatcgcaactttgcgccagcgatagtgacttgatcaatgcacatttcgagtgccttgttaacaacatcaatgaagcattttacacaatccttgatgttatctgaagcaacctgtatttgacccttgacgatgtcaaaaacacctgtaatgagaaatttgagaatctcccaagcatccttgagaaattcaactcctgcactaagtttcgcctcaatccattcaaagataggcctgagtttttcaacagtagtgcccaaaagattagacaaccactgagaagtctgttgtacaagaccaccagttacatatgccataataatgacactgttggtgagcaggtctgaagtataaaccatggcgtcgacaagacgtaatgactgttcagaaataccatcaagtatggtgacagctgctctttgcaaatcaggaattgagtggtttgctgcatcaagtgtgcgcgcaaaaattgatctgataacaccagcagcctgtgagggaaaaccacacagtggtgttaaaactgatctctgttgtccaatgttccaagcaccttttacgggctttcccttggtaactttatagttaccgcaggactcaacaatggttttgaaagacttgtaatcaagactctttatagtgtcaataaaggcacttgtagaagcagagaaagatgccaaaatgatggcaacctcttcattcaaatgaaaatcgccaacaatgttaatgttaacacgttcacgactcagtatctcaaggagatcctcattcaaggtctccacattgtcaccagtaatgccagtatggcctgagccaatatcagcactagcacgaggaacccagtaggcacgcttattatagcagccaacataggcaaacacacagcctccaaaacatctagtcctacctcccttgcggagtcgagtttcaatgtttgagtggttgtgataatctgcaacactatgctcaggtccaatctctgggtcttgacaggcaggacatggcattttcactacagcattagtaggtaggtacccacatgtagtaggtccttcaataactaaattttcagtgccacaatgttcacaagtggctttcagaaagtcgcacgtctgccatgaaacttcatcgcaatgattacatttcatcaaggtagacaagtgcatattgttacactcctgtggagatgcaacagggtacacagagcgtatacgccccatgaaaccctcagtctttttcttttcaacacgtggttgaatgactttgacttttgagttaagaggaaacacaaactttgggcattcccctttgaaagtgtcaaatttcttggcactcttaatttcgaagggtgtctggtgctcgtagctcttatcagagcgctcagtgaaccaggcaatttcatgctcatggtcacggcagcagtagacacctctcttcgactcgatgtaatcaagttgttcggaaagagtgcacattgacttgcccgcgcgtgcgagaaaatctttgatgcaatcaagagggtacccatctgggccacagaaattgttgtcgacatagcgagtgactgcacctccattgagctcacgagtgagttcacggagtgcaccactgccatgcttagtgttccagttttgttcataatcttcaatgggatcagtgccaagctcgtcacctaagtcataagactttagatcgatgccatagctatgaccaccggctcccttattaccgttcttacgaagaagaacattgcggtatgcaattggggtttcgcccacatgtggcacgagtactcccagtgttataccgctacgaccgtactgaatgccgtccatttctgcaaccagctcaacgaccttgtggccgtgattggtgcttaaggcatcagaacgtttaatgaacacatagggctgttcaagctggggcagtacgcctttttccagctctactagaccacaagtgccatttttgaggtgttcacgtgcctccgatagggcctcttccacagagtccccgaagccacgcactagcacgtctctaacctgaaggacaggcaaactgagttggacgtgtgttttctcgttgacaccaagaacaaggctctccatcttacctttcggtcacacccggacgaaacctaggtatgctgatgatcgactgcaacacggacgaaaccgtaagcagtctgcagaagagggacgagttactcgtttcttgtcaacgacagtaaaatttattattgtttatactgcgtaggtgcactaggcatgcagccgagcgacagctacacagattttaaagttcgtttagagaacagatctacaagagatcgaggttggttggcttttcctgggtaggtaaaaacctaatat

SEQ ID NO: 19 - RNA, 29751 nt, Unknown
  Description of Unknown: SARS coronavirus Tor2 sequence
auauuagguuuuuaccuacccaggaaaagccaaccaaccucgaucucuuguagaucuguucucuaaacgaacuuuaaaaucuguguagcugucgcucggcugcaugccuagugcaccuacgcaguauaaacaauaauaaauuuuacugucguugacaagaaacgaguaacucgucccucuucugcagacugcuuacgguuucguccguguugcagucgaucaucagcauaccuagguuucguccgggugugaccgaaagguaagauggagagccuuguucuuggugucaacgagaaaacacacguccaacucaguuugccuguccuucagguuagagacgugcuagugcguggcuucggggacucuguggaagaggcccuaucggaggcacgugaacaccucaaaaauggcacuuguggucuaguagagcuggaaaaaggcguacugccccagcuugaacagcccuauguguucauuaaacguucugaugccuuaagcaccaaucacggccacaaggucguugagcugguugcagaaauggacggcauucaguacggucguagcgguauaacacugggaguacucgugccacaugugggcgaaaccccaauugcauaccgcaauguucuucuucguaagaacgguaauaagggagccgguggucauagcuauggcaucgaucuaaagucuuaugacuuaggugacgagcuuggcacugaucccauugaagauuaugaacaaaacuggaacacuaagcauggcaguggugcacuccgugaacucacucgugagcucaauggaggugcagucacucgcuaugucgacaacaauuucuguggcccagauggguacccucuugauugcaucaaagauuuucucgcacgcgcgggcaagucaaugugcacucuuuccgaacaacuugauuacaucgagucgaagagaggugucuacugcugccgugaccaugagcaugaaauugccugguucacugagcgcucugauaagagcuacgagcaccagacacccuucgaaauuaagagugccaagaaauuugacacuuucaaaggggaaugcccaaaguuuguguuuccucuuaacucaaaagucaaagucauucaaccacguguugaaaagaaaaagacugaggguuucauggggcguauacgcucuguguacccuguugcaucuccacaggaguguaacaauaugcacuugucuaccuugaugaaauguaaucauugcgaugaaguuucauggcagacgugcgacuuucugaaagccacuugugaacauuguggcacugaaaauuuaguuauugaaggaccuacuacauguggguaccuaccuacuaaugcuguagugaaaaugccauguccugccugucaagacccagagauuggaccugagcauaguguugcagauuaucacaaccacucaaacauugaaacucgacuccgcaagggagguaggacuagauguuuuggaggcuguguguuugccuauguuggcugcuauaauaagcgugccuacuggguuccucgugcuagugcugauauuggcucaggccauacuggcauuacuggugacaauguggagaccuugaaugaggaucuccuugagauacugagucgugaacguguuaacauuaacauuguuggcgauuuucauuugaaugaagagguugccaucauuuuggcaucuuucucugcuucuacaagugccuuuauugacacuauaaagagucuugauuacaagucuuucaaaaccauuguugaguccugcgguaacuauaaaguuaccaagggaaagcccguaaaaggugcuuggaacauuggacaacagagaucaguuuuaacaccacugugugguuuucccucacaggcugcugguguuaucagaucaauuuuugcgcgcacacuugaugcagcaaaccacucaauuccugauuugcaaagagcagcugucaccauacuugaugguauuucugaacagucauuacgucuugucgacgccaugguuuauacuucagaccugcucaccaacagugucauuauuauggcauauguaacugguggucuuguacaacagacuucucagugguugucuaaucuuuugggcacuacuguugaaaaacucaggccuaucuuugaauggauugaggcgaaacuuagugcaggaguugaauuucucaaggaugcuugggagauucucaaauuucucauuacagguguuuuugacaucgucaagggucaaauacagguugcuucagauaacaucaaggauuguguaaaaugcuucauugauguuguuaacaaggcacucgaaaugugcauugaucaagucacuaucgcuggcgcaaaguugcgaucacucaacuuaggugaagucuucaucgcucaaagcaagggacuuuaccgucaguguauacguggcaaggagcagcugcaacuacucaugccucuuaaggcaccaaaagaaguaaccuuucuugaaggugauucacaugacacaguacuuaccucugaggagguuguucucaagaacggugaacucgaagcacucgagacgcccguugauagcuucacaaauggagcuaucguuggcacaccagucuguguaaauggccucaugcucuuagagauuaaggacaaagaacaauacugcgcauugucuccugguuuacuggcuacaaacaaugucuuucgcuuaaaagggggugcaccaauuaaagguguaaccuuuggagaagauacuguuugggaaguucaagguuacaagaaugugagaaucacauuugagcuugaugaacguguugacaaagugcuuaaugaaaagugcucugucuacacuguugaauccgguaccgaaguuacugaguuugcauguguuguagcagaggcuguugugaagacuuuacaaccaguuucugaucuccuuaccaacauggguauugaucuugaugaguggaguguagcuacauucuacuuauuugaugaugcuggugaagaaaacuuuucaucacguauguauuguuccuuuuacccuccagaugaggaagaagaggacgaugcagagugugaggaagaagaaauugaugaaaccugugaacaugaguacgguacagaggaugauuaucaaggucucccucuggaauuuggugccucagcugaaacaguucgaguugaggaagaagaagaggaagacuggcuggaugauacuacugagcaaucagagauugagccagaaccagaaccuacaccugaagaaccaguuaaucaguuuacugguuauuuaaaacuuacugacaauguugccauuaaauguguugacaucguuaaggaggcacaaagugcuaauccuauggugauuguaaaugcugcuaacauacaccugaaacaugguggugguguagcaggugcacucaacaaggcaaccaauggugccaugcaaaaggagagugaugauuacauuaagcuaaauggcccucuuacaguaggagggucuuguuugcuuucuggacauaaucuugcuaagaagugucugcauguuguuggaccuaaccuaaaugcaggugaggacauccagcuucuuaaggcagcauaugaaaauuucaauucacaggacaucuuacuugcaccauuguugucagcaggcauauuuggugcuaaaccacuucagucuuuacaagugugcgugcagacgguucguacacagguuuauauugcagucaaugacaaagcucuuuaugagcagguugucauggauuaucuugauaaccugaagccuagaguggaagcaccuaaacaagaggagccaccaaacacagaagauuccaaaacugaggagaaaucugucguacagaagccugucgaugugaagccaaaaauuaaggccugcauugaugagguuaccacaacacuggaagaaacuaaguuucuuaccaauaaguuacucuuguuugcugauaucaaugguaagcuuuaccaugauucucagaacaugcuuagaggugaagauaugucuuuccuugagaaggaugcaccuuacaugguaggugauguuaucacuaguggugauaucacuuguguuguaauacccuccaaaaaggcugguggcacuacugagaugcucucaagagcuuugaagaaagugccaguugaugaguauauaaccacguacccuggacaaggaugugcugguuauacacuugaggaagcuaagacugcucuuaagaaaugcaaaucugcauuuuauguacuaccuucagaagcaccuaaugcuaaggaagagauucuaggaacuguauccuggaauuugagagaaaugcuugcucaugcugaagagacaagaaaauuaaugccuauaugcauggauguuagagccauaauggcaaccauccaacguaaguauaaaggaauuaaaauucaagagggcaucguugacuaugguguccgauucuucuuuuauacuaguaaagagccuguagcuucuauuauuacgaagcugaacucucuaaaugagccgcuugucacaaugccaauugguuaugugacacaugguuuuaaucuugaagaggcugcgcgcuguaugcguucucuuaaagcuccugccguagugucaguaucaucaccagaugcuguuacuacauauaauggauaccucacuucgucaucaaagacaucugaggagcacuuuguagaaacaguuucuuuggcuggcucuuacagagauugguccuauucaggacagcguacagaguuagguguugaauuucuuaagcguggugacaaaauuguguaccacacucuggagagccccgucgaguuucaucuugacggugagguucuuucacuugacaaacuaaagagucucuuaucccugcgggagguuaagacuauaaaaguguucacaacuguggacaacacuaaucuccacacacagcuuguggauaugucuaugacauauggacagcaguuugguccaacauacuuggauggugcugauguuacaaaaauuaaaccucauguaaaucaugaggguaagacuuucuuuguacuaccuagugaugacacacuacguagugaagcuuucgaguacuaccauacucuugaugagaguuuucuugguagguacaugucugcuuuaaaccacacaaagaaauggaaauuuccucaaguuggugguuuaacuucaauuaaaugggcugauaacaauuguuauuugucuaguguuuuauuagcacuucaacagcuugaagucaaauucaaugcaccagcacuucaagaggcuuauuauagagcccgugcuggugaugcugcuaacuuuugugcacucauacucgcuuacaguaauaaaacuguuggcgagcuuggugaugucagagaaacuaugacccaucuucuacagcaugcuaauuuggaaucugcaaagcgaguucuuaaugugguguguaaacauuguggucagaaaacuacuaccuuaacggguguagaagcugugauguauauggguacucuaucuuaugauaaucuuaagacagguguuuccauuccauguguguguggucgugaugcuacacaauaucuaguacaacaagagucuucuuuuguuaugaugucugcaccaccugcugaguauaaauuacagcaagguacauucuuaugugcgaaugaguacacugguaacuaucaguguggucauuacacucauauaacugcuaaggagacccucuaucguauugacggagcucaccuuacaaagaugucagaguacaaaggaccagugacugauguuuucuacaaggaaacaucuuacacuacaaccaucaagccugugucguauaaacucgauggaguuacuuacacagagauugaaccaaaauuggauggguauuauaaaaaggauaaugcuuacuauacagagcagccuauagaccuuguaccaacucaaccauuaccaaaugcgaguuuugauaauuucaaacucacauguucuaacacaaaauuugcugaugauuuaaaucaaaugacaggcuucacaaagccagcuucacgagagcuaucugucacauucuucccagacuugaauggcgauguaguggcuauugacuauagacacuauucagcgaguuucaagaaaggugcuaaauuacugcauaagccaauuguuuggcacauuaaccaggcuacaaccaagacaacguucaaaccaaacacuugguguuuacguugucuuuggaguacaaagccaguagauacuucaaauucauuugaaguucuggcaguagaagacacacaaggaauggacaaucuugcuugugaaagucaacaacccaccucugaagaaguaguggaaaauccuaccauacagaaggaagucauagagugugacgugaaaacuaccgaaguuguaggcaaugucauacuuaaaccaucagaugaagguguuaaaguaacacaagaguuaggucaugaggaucuuauggcugcuuauguggaaaacacaagcauuaccauuaagaaaccuaaugagcuuucacuagccuuagguuuaaaaacaauugccacucaugguauugcugcaauuaauaguguuccuuggaguaaaauuuuggcuuaugucaaaccauucuuaggacaagcagcaauuacaacaucaaauugcgcuaagagauuagcacaacguguguuuaacaauuauaugccuuauguguuuacauuauuguuccaauuguguacuuuuacuaaaaguaccaauucuagaauuagagcuucacuaccuacaacuauugcuaaaaauaguguuaagaguguugcuaaauuauguuuggaugccggcauuaauuaugugaagucacccaaauuuucuaaauuguucacaaucgcuauguggcuauuguuguuaaguauuugcuuagguucucuaaucuguguaacugcugcuuuugguguacucuuaucuaauuuuggugcuccuucuuauuguaauggcguuagagaauuguaucuuaauucgucuaacguuacuacuauggauuucugugaagguucuuuuccuugcagcauuuguuuaaguggauuagacucccuugauucuuauccagcucuugaaaccauucaggugacgauuucaucguacaagcuagacuugacaauuuuaggucuggccgcugaguggguuuuggcauauauguuguucacaaaauucuuuuauuuauuaggucuuucagcuauaaugcagguguucuuuggcuauuuugcuagucauuucaucagcaauucuuggcucaugugguuuaucauuaguauuguacaaauggcacccguuucugcaaugguuaggauguacaucuucuuugcuucuuucuacuacauauggaagagcuauguucauaucauggaugguugcaccucuucgacuugcaugaugugcuauaagcgcaaucgugccacacgcguugaguguacaacuauuguuaauggcaugaagagaucuuucuaugucuaugcaaauggaggccguggcuucugcaagacucacaauuggaauugucucaauugugacacauuuugcacugguaguacauucauuagugaugaaguugcucgugauuugucacuccaguuuaaaagaccaaucaacccuacugaccagucaucguauauuguugauaguguugcugugaaaaauggcgcgcuucaccucuacuuugacaaggcuggucaaaagaccuaugagagacauccgcucucccauuuugucaauuuagacaauuugagagcuaacaacacuaaagguucacugccuauuaaugucauaguuuuugauggcaaguccaaaugcgacgagucugcuucuaagucugcuucuguguacuacagucagcugaugugccaaccuauucuguugcuugaccaagcucuuguaucagacguuggagauaguacugaaguuuccguuaagauguuugaugcuuaugucgacaccuuuucagcaacuuuuaguguuccuauggaaaaacuuaaggcacuuguugcuacagcucacagcgaguuagcaaaggguguagcuuuagaugguguccuuucuacauucgugucagcugcccgacaagguguuguugauaccgauguugacacaaaggauguuauugaaugucucaaacuuucacaucacucugacuuagaagugacaggugacaguuguaacaauuucaugcucaccuauaauaagguugaaaacaugacgcccagagaucuuggcgcauguauugacuguaaugcaaggcauaucaaugcccaaguagcaaaaagucacaauguuucacucaucuggaauguaaaagacuacaugucuuuaucugaacagcugcguaaacaaauucguagugcugccaagaagaacaacauaccuuuuagacuaacuugugcuacaacuagacagguugucaaugucauaacuacuaaaaucucacucaagggugguaagauuguuaguacuuguuuuaaacuuaugcuuaaggccacauuauugugcguucuugcugcauugguuuguuauaucguuaugccaguacauacauugucaauccaugaugguuacacaaaugaaaucauugguuacaaagccauucaggauggugucacucgugacaucauuucuacugaugauuguuuugcaaauaaacaugcugguuuugacgcaugguuuagccagcguggugguucauacaaaaaugacaaaagcugcccuguaguagcugcuaucauuacaagagagauugguuucauagugccuggcuuaccggguacugugcugagagcaaucaauggugacuucuugcauuuucuaccucguguuuuuagugcuguuggcaacauuugcuacacaccuuccaaacucauugaguauagugauuuugcuaccucugcuugcguucuugcugcugaguguacaauuuuuaaggaugcuaugggcaaaccugugccauauuguuaugacacuaauuugcuagaggguucuauuucuuauagugagcuucguccagacacucguuaugugcuuauggaugguuccaucauacaguuuccuaacacuuaccuggaggguucuguuagaguaguaacaacuuuugaugcugaguacuguagacaugguacaugcgaaaggucagaaguagguauuugccuaucuaccagugguagauggguucuuaauaaugagcauuacagagcucuaucaggaguuuucugugguguugaugcgaugaaucucauagcuaacaucuuuacuccucuugugcaaccugugggugcuuuagaugugucugcuucaguaguggcuggugguauuauugccauauuggugacuugugcugccuacuacuuuaugaaauucagacguguuuuuggugaguacaaccauguuguugcugcuaaugcacuuuuguuuuugaugucuuucacuauacucugucugguaccagcuuacagcuuucugccgggagucuacucagucuuuuacuuguacuugacauucuauuucaccaaugauguuucauucuuggcucaccuucaaugguuugccauguuuucuccuauugugccuuuuuggauaacagcaaucuauguauucuguauuucucugaagcacugccauugguucuuuaacaacuaucuuaggaaaagagucauguuuaauggaguuacauuuaguaccuucgaggaggcugcuuuguguaccuuuuugcucaacaaggaaauguaccuaaaauugcguagcgagacacuguugccacuuacacaguauaacagguaucuugcucuauauaacaaguacaaguauuucaguggagccuuagauacuaccagcuaucgugaagcagcuugcugccacuuagcaaaggcucuaaaugacuuuagcaacucaggugcugauguucucuaccaaccaccacagacaucaaucacuucugcuguucugcagagugguuuuaggaaaauggcauucccgucaggcaaaguugaagggugcaugguacaaguaaccuguggaacuacaacucuuaauggauugugguuggaugacacaguauacuguccaagacaugucauuugcacagcagaagacaugcuuaauccuaacuaugaagaucugcucauucgcaaauccaaccauagcuuucuuguucaggcuggcaauguucaacuucguguuauuggccauucuaugcaaaauugucugcuuaggcuuaaaguugauacuucuaacccuaagacacccaaguauaaauuuguccguauccaaccuggucaaacauuuucaguucuagcaugcuacaaugguucaccaucugguguuuaucagugugccaugagaccuaaucauaccauuaaagguucuuuccuuaauggaucaugugguaguguugguuuuaacauugauuaugauugcgugucuuucugcuauaugcaucauauggagcuuccaacaggaguacacgcugguacugacuuagaagguaaauucuaugguccauuuguugacagacaaacugcacaggcugcagguacagacacaaccauaacauuaaauguuuuggcauggcuguaugcugcuguuaucaauggugauaggugguuucuuaauagauucaccacuacuuugaaugacuuuaaccuuguggcaaugaaguacaacuaugaaccuuugacacaagaucauguugacauauugggaccucuuucugcucaaacaggaauugccgucuuagauaugugugcugcuuugaaagagcugcugcagaaugguaugaauggucguacuauccuugguagcacuauuuuagaagaugaguuuacaccauuugauguuguuagacaaugcucugguguuaccuuccaagguaaguucaagaaaauuguuaagggcacucaucauuggaugcuuuuaacuuucuugacaucacuauugauucuuguucaaaguacacaguggucacuguuuuucuuuguuuacgagaaugcuuucuugccauuuacucuugguauuauggcaauugcugcaugugcuaugcugcuuguuaagcauaagcacgcauucuugugcuuguuucuguuaccuucucuugcaacaguugcuuacuuuaauauggucuacaugccugcuagcugggugaugcguaucaugacauggcuugaauuggcugacacuagcuugucugguuauaggcuuaaggauuguguuauguaugcuucagcuuuaguuuugcuuauucucaugacagcucgcacuguuuaugaugaugcugcuagacguguuuggacacugaugaaugucauuacacuuguuuacaaagucuacuaugguaaugcuuuagaucaagcuauuuccaugugggccuuaguuauuucuguaaccucuaacuauucuggugucguuacgacuaucauguuuuuagcuagagcuauaguguuuguguguguugaguauuacccauuguuauuuauuacuggcaacaccuuacaguguaucaugcuuguuuauuguuucuuaggcuauuguugcugcugcuacuuuggccuuuucuguuuacucaaccguuacuucaggcuuacucuugguguuuaugacuacuuggucucuacacaagaauuuagguauaugaacucccaggggcuuuugccuccuaagaguaguauugaugcuuucaagcuuaacauuaaguuguuggguauuggagguaaaccauguaucaagguugcuacuguacagucuaaaaugucugacguaaagugcacaucugugguacugcucucgguucuucaacaacuuagaguagagucaucuucuaaauugugggcacaauguguacaacuccacaaugauauucuucuugcaaaagacacaacugaagcuuucgagaagaugguuucucuuuugucuguuuugcuauccaugcagggugcuguagacauuaauagguugugcgaggaaaugcucgauaaccgugcuacucuucaggcuauugcuucagaauuuaguucuuuaccaucauaugccgcuuaugccacugcccaggaggccuaugagcaggcuguagcuaauggugauucugaagucguucucaaaaaguuaaagaaaucuuugaauguggcuaaaucugaguuugaccgugaugcugccaugcaacgcaaguuggaaaagauggcagaucaggcuaugacccaaauguacaaacaggcaagaucugaggacaagagggcaaaaguaacuagugcuaugcaaacaaugcucuucacuaugcuuaggaagcuugauaaugaugcacuuaacaacauuaucaacaaugcgcgugaugguuguguuccacucaacaucauaccauugacuacagcagccaaacucaugguuguugucccugauuaugguaccuacaagaacacuugugaugguaacaccuuuacauaugcaucugcacucugggaaauccagcaaguuguugaugcggauagcaagauuguucaacuuagugaaauuaacauggacaauucaccaaauuuggcuuggccucuuauuguuacagcucuaagagccaacucagcuguuaaacuacagaauaaugaacugaguccaguagcacuacgacagauguccugugcggcugguaccacacaaacagcuuguacugaugacaaugcacuugccuacuauaacaauucgaagggagguagguuugugcuggcauuacuaucagaccaccaagaucucaaaugggcuagauucccuaagagugaugguacagguacaauuuacacagaacuggaaccaccuuguagguuuguuacagacacaccaaaagggccuaaagugaaauacuuguacuucaucaaaggcuuaaacaaccuaaauagagguauggugcugggcaguuuagcugcuacaguacgucuucaggcuggaaaugcuacagaaguaccugccaauucaacugugcuuuccuucugugcuuuugcaguagacccugcuaaagcauauaaggauuaccuagcaaguggaggacaaccaaucaccaacugugugaagauguuguguacacacacugguacaggacaggcaauuacuguaacaccagaagcuaacauggaccaagaguccuuugguggugcuucauguugucuguauuguagaugccacauugaccauccaaauccuaaaggauucugugacuugaaagguaaguacguccaaauaccuaccacuugugcuaaugacccaguggguuuuacacuuagaaacacagucuguaccgucugcggaauguggaaagguuauggcuguaguugugaccaacuccgcgaacccuugaugcagucugcggaugcaucaacguuuuuaaacggguuugcgguguaagugcagcccgucuuacaccgugcggcacaggcacuaguacugaugucgucuacagggcuuuugauauuuacaacgaaaaaguugcugguuuugcaaaguuccuaaaaacuaauugcugucgcuuccaggagaaggaugaggaaggcaauuuauuagacucuuacuuuguaguuaagaggcauacuaugucuaacuaccaacaugaagagacuauuuauaacuugguuaaagauuguccagcgguugcuguccaugacuuuuucaaguuuagaguagauggugacaugguaccacauauaucacgucagcgucuaacuaaauacacaauggcugauuuagucuaugcucuacgucauuuugaugaggguaauugugauacauuaaaagaaauacucgucacauacaauugcugugaugaugauuauuucaauaagaaggauugguaugacuucguagagaauccugacaucuuacgcguauaugcuaacuuaggugagcguguacgccaaucauuauuaaagacuguacaauucugcgaugcuaugcgugaugcaggcauuguaggcguacugacauuagauaaucaggaucuuaaugggaacugguacgauuucggugauuucguacaaguagcaccaggcugcggaguuccuauuguggauucauauuacucauugcugaugcccauccucacuuugacuagggcauuggcugcugagucccauauggaugcugaucucgcaaaaccacuuauuaagugggauuugcugaaauaugauuuuacggaagagagacuuugucucuucgaccguuauuuuaaauauugggaccagacauaccaucccaauuguauuaacuguuuggaugauagguguauccuucauugugcaaacuuuaauguguuauuuucuacuguguuuccaccuacaaguuuuggaccacuaguaagaaaaauauuuguagaugguguuccuuuuguuguuucaacuggauaccauuuucgugaguuaggagucguacauaaucaggauguaaacuuacauagcucgcgucucaguuucaaggaacuuuuaguguaugcugcugauccagcuaugcaugcagcuucuggcaauuuauugcuagauaaacgcacuacaugcuuuucaguagcugcacuaacaaacaauguugcuuuucaaacugucaaacccgguaauuuuaauaaagacuuuuaugacuuugcugugucuaaagguuucuuuaaggaaggaaguucuguugaacuaaaacacuucuucuuugcucaggauggcaacgcugcuaucagugauuaugacuauuaucguuauaaucugccaacaaugugugauaucagacaacuccuauucguaguugaaguuguugauaaauacuuugauuguuacgaugguggcuguauuaaugccaaccaaguaaucguuaacaaucuggauaaaucagcugguuucccauuuaauaaaugggguaaggcuagacuuuauuaugacucaaugaguuaugaggaucaagaugcacuuuucgcguauacuaagcguaaugucaucccuacuauaacucaaaugaaucuuaaguaugccauuagugcaaagaauagagcucgcaccguagcuggugucucuaucuguaguacuaugacaaauagacaguuucaucagaaauuauugaagucaauagccgccacuagaggagcuacugugguaauuggaacaagcaaguuuuacgguggcuggcauaauauguuaaaaacuguuuacagugauguagaaacuccacaccuuauggguugggauuauccaaaaugugacagagccaugccuaacaugcuuaggauaauggccucucuuguucuugcucgcaaacauaacacuugcuguaacuuaucacaccguuucuacagguuagcuaacgagugugcgcaaguauuaagugagauggucauguguggcggcucacuauauguuaaaccagguggaacaucauccggugaugcuacaacugcuuaugcuaauagugucuuuaacauuugucaagcuguuacagccaauguaaaugcacuucuuucaacugaugguaauaagauagcugacaaguauguccgcaaucuacaacacaggcucuaugagugucucuauagaaauagggauguugaucaugaauucguggaugaguuuuacgcuuaccugcguaaacauuucuccaugaugauucuuucugaugaugccguugugugcuauaacaguaacuaugcggcucaagguuuaguagcuagcauuaagaacuuuaaggcaguucuuuauuaucaaaauaauguguucaugucugaggcaaaauguuggacugagacugaccuuacuaaaggaccucacgaauuuugcucacagcauacaaugcuaguuaaacaaggagaugauuacguguaccugccuuacccagauccaucaagaauauuaggcgcaggcuguuuugucgaugauauugucaaaacagaugguacacuuaugauugaaagguucgugucacuggcuauugaugcuuacccacuuacaaaacauccuaaucaggaguaugcugaugucuuucacuuguauuuacaauacauuagaaaguuacaugaugagcuuacuggccacauguuggacauguauuccguaaugcuaacuaaugauaacaccucacgguacugggaaccugaguuuuaugaggcuauguacacaccacauacagucuugcaggcuguaggugcuuguguauugugcaauucacagacuucacuucguugcggugccuguauuaggagaccauuccuauguugcaagugcugcuaugaccaugucauuucaacaucacacaaauuaguguugucuguuaaucccuauguuugcaaugccccagguugugaugucacugaugugacacaacuguaucuaggagguaugagcuauuauugcaagucacauaagccucccauuaguuuuccauuaugugcuaauggucagguuuuugguuuauacaaaaacacauguguaggcagugacaaugucacugacuucaaugcgauagcaacaugugauuggacuaaugcuggcgauuacauacuugccaacacuuguacugagagacucaagcuuuucgcagcagaaacgcucaaagccacugaggaaacauuuaagcugucauaugguauugccacuguacgcgaaguacucucugacagagaauugcaucuuucaugggagguuggaaaaccuagaccaccauugaacagaaacuaugucuuuacugguuaccguguaacuaaaaauaguaaaguacagauuggagaguacaccuuugaaaaaggugacuauggugaugcuguuguguacagagguacuacgacauacaaguugaauguuggugauuacuuuguguugacaucucacacuguaaugccacuuagugcaccuacucuagugccacaagagcacuaugugagaauuacuggcuuguacccaacacucaacaucucagaugaguuuucuagcaauguugcaaauuaucaaaaggucggcaugcaaaaguacucuacacuccaaggaccaccugguacugguaagagucauuuugccaucggacuugcucucuauuacccaucugcucgcauaguguauacggcaugcucucaugcagcuguugaugcccuaugugaaaaggcauuaaaauauuugcccauagauaaauguaguagaaucauaccugcgcgugcgcgcguagaguguuuugauaaauucaaagugaauucaacacuagaacaguauguuuucugcacuguaaaugcauugccagaaacaacugcugacauuguagucuuugaugaaaucucuauggcuacuaauuaugacuugaguguugucaaugcuagacuucgugcaaaacacuacgucuauauuggcgauccugcucaauuaccagccccccgcacauugcugacuaaaggcacacuagaaccagaauauuuuaauucagugugcagacuuaugaaaacaauagguccagacauguuccuuggaacuugucgccguuguccugcugaaauuguugacacugugagugcuuuaguuuaugacaauaagcuaaaagcacacaaggauaagucagcucaaugcuucaaaauguucuacaaagguguuauuacacaugauguuucaucugcaaucaacagaccucaaauaggcguuguaagagaauuucuuacacgcaauccugcuuggagaaaagcuguuuuuaucucaccuuauaauucacagaacgcuguagcuucaaaaaucuuaggauugccuacgcagacuguugauucaucacaggguucugaauaugacuaugucauauucacacaaacuacugaaacagcacacucuuguaaugucaaccgcuucaauguggcuaucacaagggcaaaaauuggcauuuugugcauaaugucugauagagaucuuuaugacaaacugcaauuuacaagucuagaaauaccacgucgcaauguggcuacauuacaagcagaaaauguaacuggacuuuuuaaggacuguaguaagaucauuacuggucuucauccuacacaggcaccuacacaccucagcguugauauaaaguucaagacugaaggauuauguguugacauaccaggcauaccaaaggacaugaccuaccguagacucaucucuaugauggguuucaaaaugaauuaccaagucaaugguuacccuaauauguuuaucacccgcgaagaagcuauucgucacguucgugcguggauuggcuuugauguagagggcugucaugcaacuagagaugcuguggguacuaaccuaccucuccagcuaggauuuucuacagguguuaacuuaguagcuguaccgacugguuauguugacacugaaaauaacacagaauucaccagaguuaaugcaaaaccuccaccaggugaccaguuuaaacaucuuauaccacucauguauaaaggcuugcccuggaauguagugcguauuaagauaguacaaaugcucagugauacacugaaaggauugucagacagagucguguucguccuuugggcgcauggcuuugagcuuacaucaaugaaguacuuugucaagauuggaccugaaagaacguguugucugugugacaaacgugcaacuugcuuuucuacuucaucagauacuuaugccugcuggaaucauucuguggguuuugacuaugucuauaacccauuuaugauugauguucagcaguggggcuuuacggguaaccuucagaguaaccaugaccaacauugccagguacauggaaaugcacauguggcuaguugugaugcuaucaugacuagauguuuagcaguccaugagugcuuuguuaagcgcguugauuggucuguugaauacccuauuauaggagaugaacugaggguuaauucugcuugcagaaaaguacaacacaugguugugaagucugcauugcuugcugauaaguuuccaguucuucaugacauuggaaauccaaaggcuaucaagugugugccucaggcugaaguagaauggaaguucuacgaugcucagccauguagugacaaagcuuacaaaauagaggaacucuucuauucuuaugcuacacaucacgauaaauucacugaugguguuuguuuguuuuggaauuguaacguugaucguuacccagccaaugcaauuguguguagguuugacacaagagucuugucaaacuugaacuuaccaggcugugauggugguaguuuguaugugaauaagcaugcauuccacacuccagcuuucgauaaaagugcauuuacuaauuuaaagcaauugccuuucuuuuacuauucugauaguccuugugagucucauggcaaacaaguagugucggauauugauuauguuccacucaaaucugcuacguguauuacacgaugcaauuuagguggugcuguuugcagacaccaugcaaaugaguaccgacaguacuuggaugcauauaauaugaugauuucugcuggauuuagccuauggauuuacaaacaauuugauacuuauaaccuguggaauacauuuaccagguuacagaguuuagaaaauguggcuuauaauguuguuaauaaaggacacuuugauggacacgccggcgaagcaccuguuuccaucauuaauaaugcuguuuacacaaagguagaugguauugauguggagaucuuugaaaauaagacaacacuuccuguuaauguugcauuugagcuuugggcuaagcguaacauuaaaccagugccagagauuaagauacucaauaauuuggguguugauaucgcugcuaauacuguaaucugggacuacaaaagagaagccccagcacauguaucuacaauaggugucugcacaaugacugacauugccaagaaaccuacugagagugcuuguucuucacuuacugucuuguuugaugguagaguggaaggacagguagaccuuuuuagaaacgcccguaaugguguuuuaauaacagaagguucagucaaaggucuaacaccuucaaagggaccagcacaagcuagcgucaauggagucacauuaauuggagaaucaguaaaaacacaguuuaacuacuuuaagaaaguagacggcauuauucaacaguugccugaaaccuacuuuacucagagcagagacuuagaggauuuuaagcccagaucacaaauggaaacugacuuucucgagcucgcuauggaugaauucauacagcgauauaagcucgagggcuaugccuucgaacacaucguuuauggagauuucagucauggacaacuuggcggucuucauuuaaugauaggcuuagccaagcgcucacaagauucaccacuuaaauuagaggauuuuaucccuauggacagcacagugaaaaauuacuucauaacagaugcgcaaacagguucaucaaaauguguguguucugugauugaucuuuuacuugaugacuuugucgagauaauaaagucacaagauuugucagugauuucaaaaguggucaagguuacaauugacuaugcugaaauuucauucaugcuuugguguaaggauggacauguugaaaccuucuacccaaaacuacaagcaagucaagcguggcaaccagguguugcgaugccuaacuuguacaagaugcaaagaaugcuucuugaaaagugugaccuucagaauuauggugaaaaugcuguuauaccaaaaggaauaaugaugaaugucgcaaaguauacucaacugugucaauacuuaaauacacuuacuuuagcuguacccuacaacaugagaguuauucacuuuggugcuggcucugauaaaggaguugcaccagguacagcugugcucagacaaugguugccaacuggcacacuacuugucgauucagaucuuaaugacuucgucuccgacgcagauucuacuuuaauuggagacugugcaacaguacauacggcuaauaaaugggaccuuauuauuagcgauauguaugacccuaggaccaaacaugugacaaaagagaaugacucuaaagaaggguuuuucacuuaucuguguggauuuauaaagcaaaaacuagcccugggugguucuauagcuguaaagauaacagagcauucuuggaaugcugaccuuuacaagcuuaugggccauuucucaugguggacagcuuuuguuacaaauguaaaugcaucaucaucggaagcauuuuuaauuggggcuaacuaucuuggcaagccgaaggaacaaauugauggcuauaccaugcaugcuaacuacauuuucuggaggaacacaaauccuauccaguugucuuccuauucacucuuugacaugagcaaauuuccucuuaaauuaagaggaacugcuguaaugucucuuaaggagaaucaaaucaaugauaugauuuauucucuucuggaaaaagguaggcuuaucauuagagaaaacaacagaguugugguuucaagugauauucuuguuaacaacuaaacgaacauguuuauuuucuuauuauuucuuacucucacuagugguagugaccuugaccggugcaccacuuuugaugauguucaagcuccuaauuacacucaacauacuucaucuaugagggggguuuacuauccugaugaaauuuuuagaucagacacucuuuauuuaacucaggauuuauuucuuccauuuuauucuaauguuacaggguuucauacuauuaaucauacguuuggcaacccugucauaccuuuuaaggaugguauuuauuuugcugccacagagaaaucaaauguuguccgugguuggguuuuugguucuaccaugaacaacaagucacagucggugauuauuauuaacaauucuacuaauguuguuauacgagcauguaacuuugaauugugugacaacccuuucuuugcuguuucuaaacccauggguacacagacacauacuaugauauucgauaaugcauuuaauugcacuuucgaguacauaucugaugccuuuucgcuugauguuucagaaaagucagguaauuuuaaacacuuacgagaguuuguguuuaaaaauaaagauggguuucucuauguuuauaagggcuaucaaccuauagauguaguucgugaucuaccuucugguuuuaacacuuugaaaccuauuuuuaaguugccucuugguauuaacauuacaaauuuuagagccauucuuacagccuuuucaccugcucaagacauuuggggcacgucagcugcagccuauuuuguuggcuauuuaaagccaacuacauuuaugcucaaguaugaugaaaaugguacaaucacagaugcuguugauuguucucaaaauccacuugcugaacucaaaugcucuguuaagagcuuugagauugacaaaggaauuuaccagaccucuaauuucaggguuguucccucaggagauguugugagauucccuaauauuacaaacuuguguccuuuuggagagguuuuuaaugcuacuaaauucccuucugucuaugcaugggagagaaaaaaaauuucuaauuguguugcugauuacucugugcucuacaacucaacauuuuuuucaaccuuuaagugcuauggcguuucugccacuaaguugaaugaucuuugcuucuccaaugucuaugcagauucuuuuguagucaagggagaugauguaagacaaauagcgccaggacaaacugguguuauugcugauuauaauuauaaauugccagaugauuucauggguuguguccuugcuuggaauacuaggaacauugaugcuacuucaacugguaauuauaauuauaaauauagguaucuuagacauggcaagcuuaggcccuuugagagagacauaucuaaugugccuuucuccccugauggcaaaccuugcaccccaccugcucuuaauuguuauuggccauuaaaugauuaugguuuuuacaccacuacuggcauuggcuaccaaccuuacagaguuguaguacuuucuuuugaacuuuuaaaugcaccggccacgguuuguggaccaaaauuauccacugaccuuauuaagaaccagugugucaauuuuaauuuuaauggacucacugguacugguguguuaacuccuucuucaaagagauuucaaccauuucaacaauuuggccgugauguuucugauuucacugauuccguucgagauccuaaaacaucugaaauauuagacauuucaccuugcgcuuuuggggguguaaguguaauuacaccuggaacaaaugcuucaucugaaguugcuguucuauaucaagauguuaacugcacugauguuucuacagcaauucaugcagaucaacucacaccagcuuggcgcauauauucuacuggaaacaauguauuccagacucaagcaggcugucuuauaggagcugagcaugucgacacuucuuaugagugcgacauuccuauuggagcuggcauuugugcuaguuaccauacaguuucuuuauuacguaguacuagccaaaaaucuauuguggcuuauacuaugucuuuaggugcugauaguucaauugcuuacucuaauaacaccauugcuauaccuacuaacuuuucaauuagcauuacuacagaaguaaugccuguuucuauggcuaaaaccuccguagauuguaauauguacaucugcggagauucuacugaaugugcuaauuugcuucuccaauaugguagcuuuugcacacaacuaaaucgugcacucucagguauugcugcugaacaggaucgcaacacacgugaaguguucgcucaagucaaacaaauguacaaaaccccaacuuugaaauauuuuggugguuuuaauuuuucacaaauauuaccugacccucuaaagccaacuaagaggucuuuuauugaggacuugcucuuuaauaaggugacacucgcugaugcuggcuucaugaagcaauauggcgaaugccuaggugauauuaaugcuagagaucucauuugugcgcagaaguucaauggacuuacaguguugccaccucugcucacugaugauaugauugcugccuacacugcugcucuaguuagugguacugccacugcuggauggacauuuggugcuggcgcugcucuucaaauaccuuuugcuaugcaaauggcauauagguucaauggcauuggaguuacccaaaauguucucuaugagaaccaaaaacaaaucgccaaccaauuuaacaaggcgauuagucaaauucaagaaucacuuacaacaacaucaacugcauugggcaagcugcaagacguuguuaaccagaaugcucaagcauuaaacacacuuguuaaacaacuuagcucuaauuuuggugcaauuucaagugugcuaaaugauauccuuucgcgacuugauaaagucgaggcggagguacaaauugacagguuaauuacaggcagacuucaaagccuucaaaccuauguaacacaacaacuaaucagggcugcugaaaucagggcuucugcuaaucuugcugcuacuaaaaugucugaguguguucuuggacaaucaaaaagaguugacuuuuguggaaagggcuaccaccuuauguccuucccacaagcagccccgcaugguguugucuuccuacaugucacguaugugccaucccaggagaggaacuucaccacagcgccagcaauuugucaugaaggcaaagcauacuucccucgugaagguguuuuuguguuuaauggcacuucuugguuuauuacacagaggaacuucuuuucuccacaaauaauuacuacagacaauacauuugucucaggaaauugugaugucguuauuggcaucauuaacaacacaguuuaugauccucugcaaccugagcuugacucauucaaagaagagcuggacaaguacuucaaaaaucauacaucaccagauguugaucuuggcgacauuucaggcauuaacgcuucugucgucaacauucaaaaagaaauugaccgccucaaugaggucgcuaaaaauuuaaaugaaucacucauugaccuucaagaauugggaaaauaugagcaauauauuaaauggccuugguauguuuggcucggcuucauugcuggacuaauugccaucgucaugguuacaaucuugcuuuguugcaugacuaguuguugcaguugccucaagggugcaugcucuugugguucuugcugcaaguuugaugaggaugacucugagccaguucucaagggugucaaauuacauuacacauaaacgaacuuauggauuuguuuaugagauuuuuuacucuuagaucaauuacugcacagccaguaaaaauugacaaugcuucuccugcaaguacuguucaugcuacagcaacgauaccgcuacaagccucacucccuuucggauggcuuguuauuggcguugcauuucuugcuguuuuucagagcgcuaccaaaauaauugcgcucaauaaaagauggcagcuagcccuuuauaagggcuuccaguucauuugcaauuuacugcugcuauuuguuaccaucuauucacaucuuuugcuugucgcugcagguauggaggcgcaauuuuuguaccucuaugccuugauauauuuucuacaaugcaucaacgcauguagaauuauuaugagauguuggcuuuguuggaagugcaaauccaagaacccauuacuuuaugaugccaacuacuuuguuugcuggcacacacauaacuaugacuacuguauaccauauaacagugucacagauacaauugucguuacugaaggugacggcauuucaacaccaaaacucaaagaagacuaccaaauuggugguuauucugaggauaggcacucagguguuaaagacuaugucguuguacauggcuauuucaccgaaguuuacuaccagcuugagucuacacaaauuacuacagacacugguauugaaaaugcuacauucuucaucuuuaacaagcuuguuaaagacccaccgaaugugcaaauacacacaaucgacggcucuucaggaguugcuaauccagcaauggauccaauuuaugaugagccgacgacgacuacuagcgugccuuuguaagcacaagaaagugaguacgaacuuauguacucauucguuucggaagaaacagguacguuaauaguuaauagcguacuucuuuuucuugcuuucgugguauucuugcuagucacacuagccauccuuacugcgcuucgauugugugcguacugcugcaauauuguuaacgugaguuuaguaaaaccaacgguuuacgucuacucgcguguuaaaaaucugaacucuucugaaggaguuccugaucuucuggucuaaacgaacuaacuauuauuauuauucuguuuggaacuuuaacauugcuuaucauggcagacaacgguacuauuaccguugaggagcuuaaacaacuccuggaacaauggaaccuaguaauagguuuccuauuccuagccuggauuauguuacuacaauuugccuauucuaaucggaacagguuuuuguacauaauaaagcuuguuuuccucuggcucuuguggccaguaacacuugcuuguuuugugcuugcugcugucuacagaauuaauugggugacuggcgggauugcgauugcaauggcuuguauuguaggcuugauguggcuuagcuacuucguugcuuccuucaggcuguuugcucguacccgcucaauguggucauucaacccagaaacaaacauucuucucaaugugccucuccgggggacaauugugaccagaccgcucauggaaagugaacuugucauuggugcugugaucauucguggucacuugcgaauggccggacacucccuagggcgcugugacauuaaggaccugccaaaagagaucacuguggcuacaucacgaacgcuuucuuauuacaaauuaggagcgucgcagcguguaggcacugauucagguuuugcugcauacaaccgcuaccguauuggaaacuauaaauuaaauacagaccacgccgguagcaacgacaauauugcuuugcuaguacaguaagugacaacagauguuucaucuuguugacuuccagguuacaauagcagagauauugauuaucauuaugaggacuuucaggauugcuauuuggaaucuugacguuauaauaaguucaauagugagacaauuauuuaagccucuaacuaagaagaauuauucggaguuagaugaugaagaaccuauggaguuagauuauccauaaaacgaacaugaaaauuauucucuuccugacauugauuguauuuacaucuugcgagcuauaucacuaucaggaguguguuagagguacgacuguacuacuaaaagaaccuugcccaucaggaacauacgagggcaauucaccauuucacccucuugcugacaauaaauuugcacuaacuugcacuagcacacacuuugcuuuugcuugugcugacgguacucgacauaccuaucagcugcgugcaagaucaguuucaccaaaacuuuucaucagacaagaggagguucaacaagagcucuacucgccacuuuuucucauuguugcugcucuaguauuuuuaauacuuugcuucaccauuaagagaaagacagaaugaaugagcucacuuuaauugacuucuauuugugcuuuuuagccuuucugcuauuccuuguuuuaauaaugcuuauuauauuuugguuuucacucgaaauccaggaucuagaagaaccuuguaccaaagucuaaacgaacaugaaacuucucauuguuuugacuuguauuucucuaugcaguugcauaugcacuguaguacagcgcugugcaucuaauaaaccucaugugcuugaagauccuuguaagguacaacacuagggguaauacuuauagcacugcuuggcuuugugcucuaggaaagguuuuaccuuuucauagauggcacacuaugguucaaacaugcacaccuaauguuacuaucaacugucaagauccagcugguggugcgcuuauagcuagguguugguaccuucaugaaggucaccaaacugcugcauuuagagacguacuuguuguuuuaaauaaacgaacaaauuaaaaugucugauaauggaccccaaucaaaccaacguagugccccccgcauuacauuugguggacccacagauucaacugacaauaaccagaauggaggacgcaauggggcaaggccaaaacagcgccgaccccaagguuuacccaauaauacugcgucuugguucacagcucucacucagcauggcaaggaggaacuuagauucccucgaggccagggcguuccaaucaacaccaauagugguccagaugaccaaauuggcuacuaccgaagagcuacccgacgaguucgugguggugacggcaaaaugaaagagcucagccccagaugguacuucuauuaccuaggaacuggcccagaagcuucacuucccuacggcgcuaacaaagaaggcaucguauggguugcaacugagggagccuugaauacacccaaagaccacauuggcacccgcaauccuaauaacaaugcugccaccgugcuacaacuuccucaaggaacaacauugccaaaaggcuucuacgcagagggaagcagaggcggcagucaagccucuucucgcuccucaucacguagucgcgguaauucaagaaauucaacuccuggcagcaguaggggaaauucuccugcucgaauggcuagcggagguggugaaacugcccucgcgcuauugcugcuagacagauugaaccagcuugagagcaaaguuucugguaaaggccaacaacaacaaggccaaacugucacuaagaaaucugcugcugaggcaucuaaaaagccucgccaaaaacguacugccacaaaacaguacaacgucacucaagcauuugggagacgugguccagaacaaacccaaggaaauuucggggaccaagaccuaaucagacaaggaacugauuacaaacauuggccgcaaauugcacaauuugcuccaagugccucugcauucuuuggaaugucacgcauuggcauggaagucacaccuucgggaacauggcugacuuaucauggagccauuaaauuggaugacaaagauccacaauucaaagacaacgucauacugcugaacaagcacauugacgcauacaaaacauucccaccaacagagccuaaaaaggacaaaaagaaaaagacugaugaagcucagccuuugccgcagagacaaaagaagcagcccacugugacucuucuuccugcggcugacauggaugauuucuccagacaacuucaaaauuccaugaguggagcuucugcugauucaacucaggcauaaacacucaugaugaccacacaaggcagaugggcuauguaaacguuuucgcaauuccguuuacgauacauagucuacucuugugcagaaugaauucucguaacuaaacagcacaaguagguuuaguuaacuuuaaucucacauagcaaucuuuaaucaauguguaacauuagggaggacuugaaagagccaccacauuuucaucgaggccacgcggaguacgaucgaggguacagugaauaaugcuagggagagcugccuauauggaagagcccuaauguguaaaauuaauuuuaguagugcuauccccaugugauuuuaauagcuucuuaggagaaugacaaaaaaaaaaaaaaaaaaaaaaaa

SEQ ID NO: 20 - RNA, 29751 nt, Unknown
  Description of Unknown: SARS coronavirus Tor2 sequence
uuuuuuuuuuuuuuuuuuuuuuuugucauucuccuaagaagcuauuaaaaucacauggggauagcacuacuaaaauuaauuuuacacauuagggcucuuccauauaggcagcucucccuagcauuauucacuguacccucgaucguacuccgcguggccucgaugaaaaugugguggcucuuucaaguccucccuaauguuacacauugauuaaagauugcuaugugagauuaaaguuaacuaaaccuacuugugcuguuuaguuacgagaauucauucugcacaagaguagacuauguaucguaaacggaauugcgaaaacguuuacauagcccaucugccuuguguggucaucaugaguguuuaugccugaguugaaucagcagaagcuccacucauggaauuuugaaguugucuggagaaaucauccaugucagccgcaggaagaagagucacagugggcugcuucuuuugucucugcggcaaaggcugagcuucaucagucuuuuucuuuuuguccuuuuuaggcucuguuggugggaauguuuuguaugcgucaaugugcuuguucagcaguaugacguugucuuugaauuguggaucuuugucauccaauuuaauggcuccaugauaagucagccauguucccgaaggugugacuuccaugccaaugcgugacauuccaaagaaugcagaggcacuuggagcaaauugugcaauuugcggccaauguuuguaaucaguuccuugucugauuaggucuugguccccgaaauuuccuuggguuuguucuggaccacgucucccaaaugcuugagugacguuguacuguuuuguggcaguacguuuuuggcgaggcuuuuuagaugccucagcagcagauuucuuagugacaguuuggccuuguuguuguuggccuuuaccagaaacuuugcucucaagcugguucaaucugucuagcagcaauagcgcgagggcaguuucaccaccuccgcuagccauucgagcaggagaauuuccccuacugcugccaggaguugaauuucuugaauuaccgcgacuacgugaugaggagcgagaagaggcuugacugccgccucugcuucccucugcguagaagccuuuuggcaauguuguuccuugaggaaguuguagcacgguggcagcauuguuauuaggauugcgggugccaauguggucuuuggguguauucaaggcucccucaguugcaacccauacgaugccuucuuuguuagcgccguagggaagugaagcuucugggccaguuccuagguaauagaaguaccaucuggggcugagcucuuucauuuugccgucaccaccacgaacucgucggguagcucuucgguaguagccaauuuggucaucuggaccacuauugguguugauuggaacgcccuggccucgagggaaucuaaguuccuccuugccaugcugagugagagcugugaaccaagacgcaguauuauuggguaaaccuuggggucggcgcuguuuuggccuugccccauugcguccuccauucugguuauugucaguugaaucuguggguccaccaaauguaaugcggggggcacuacguugguuugauugggguccauuaucagacauuuuaauuuguucguuuauuuaaaacaacaaguacgucucuaaaugcagcaguuuggugaccuucaugaagguaccaacaccuagcuauaagcgcaccaccagcuggaucuugacaguugauaguaacauuaggugugcauguuugaaccauagugugccaucuaugaaaagguaaaaccuuuccuagagcacaaagccaagcagugcuauaaguauuaccccuaguguuguaccuuacaaggaucuucaagcacaugagguuuauuagaugcacagcgcuguacuacagugcauaugcaacugcauagagaaauacaagucaaaacaaugagaaguuucauguucguuuagacuuugguacaagguucuucuagauccuggauuucgagugaaaaccaaaauauaauaagcauuauuaaaacaaggaauagcagaaaggcuaaaaagcacaaauagaagucaauuaaagugagcucauucauucugucuuucucuuaauggugaagcaaaguauuaaaaauacuagagcagcaacaaugagaaaaaguggcgaguagagcucuuguugaaccuccucuugucugaugaaaaguuuuggugaaacugaucuugcacgcagcugauagguaugucgaguaccgucagcacaagcaaaagcaaagugugugcuagugcaaguuagugcaaauuuauugucagcaagagggugaaauggugaauugcccucguauguuccugaugggcaagguucuuuuaguaguacagucguaccucuaacacacuccugauagugauauagcucgcaagauguaaauacaaucaaugucaggaagagaauaauuuucauguucguuuuauggauaaucuaacuccauagguucuucaucaucuaacuccgaauaauucuucuuaguuagaggcuuaaauaauugucucacuauugaacuuauuauaacgucaagauuccaaauagcaauccugaaaguccucauaaugauaaucaauaucucugcuauuguaaccuggaagucaacaagaugaaacaucuguugucacuuacuguacuagcaaagcaauauugucguugcuaccggcguggucuguauuuaauuuauaguuuccaauacgguagcgguuguaugcagcaaaaccugaaucagugccuacacgcugcgacgcuccuaauuuguaauaagaaagcguucgugauguagccacagugaucucuuuuggcagguccuuaaugucacagcgcccuagggaguguccggccauucgcaagugaccacgaaugaucacagcaccaaugacaaguucacuuuccaugagcggucuggucacaauugucccccggagaggcacauugagaagaauguuuguuucuggguugaaugaccacauugagcggguacgagcaaacagccugaaggaagcaacgaaguagcuaagccacaucaagccuacaauacaagccauugcaaucgcaaucccgccagucacccaauuaauucuguagacagcagcaagcacaaaacaagcaaguguuacuggccacaagagccagaggaaaacaagcuuuauuauguacaaaaaccuguuccgauuagaauaggcaaauuguaguaacauaauccaggcuaggaauaggaaaccuauuacuagguuccauuguuccaggaguuguuuaagcuccucaacgguaauaguaccguugucugccaugauaagcaauguuaaaguuccaaacagaauaauaauaauaguuaguucguuuagaccagaagaucaggaacuccuucagaagaguucagauuuuuaacacgcgaguagacguaaaccguugguuuuacuaaacucacguuaacaauauugcagcaguacgcacacaaucgaagcgcaguaaggauggcuagugugacuagcaagaauaccacgaaagcaagaaaaagaaguacgcuauuaacuauuaacguaccuguuucuuccgaaacgaaugaguacauaaguucguacucacuuucuugugcuuacaaaggcacgcuaguagucgucgucggcucaucauaaauuggauccauugcuggauuagcaacuccugaagagccgucgauuguguguauuugcacauucggugggucuuuaacaagcuuguuaaagaugaagaauguagcauuuucaauaccagugucuguaguaauuuguguagacucaagcugguaguaaacuucggugaaauagccauguacaacgacauagucuuuaacaccugagugccuauccucagaauaaccaccaauuugguagucuucuuugaguuuugguguugaaaugccgucaccuucaguaacgacaauuguaucugugacacuguuauaugguauacaguagucauaguuaugugugugccagcaaacaaaguaguuggcaucauaaaguaauggguucuuggauuugcacuuccaacaaagccaacaucucauaauaauucuacaugcguugaugcauuguagaaaauauaucaaggcauagagguacaaaaauugcgccuccauaccugcagcgacaagcaaaagaugugaauagaugguaacaaauagcagcaguaaauugcaaaugaacuggaagcccuuauaaagggcuagcugccaucuuuuauugagcgcaauuauuuugguagcgcucugaaaaacagcaagaaaugcaacgccaauaacaagccauccgaaagggagugaggcuuguagcgguaucguugcuguagcaugaacaguacuugcaggagaagcauugucaauuuuuacuggcugugcaguaauugaucuaagaguaaaaaaucucauaaacaaauccauaaguucguuuauguguaauguaauuugacacccuugagaacuggcucagagucauccucaucaaacuugcagcaagaaccacaagagcaugcacccuugaggcaacugcaacaacuagucaugcaacaaagcaagauuguaaccaugacgauggcaauuaguccagcaaugaagccgagccaaacauaccaaggccauuuaauauauugcucauauuuucccaauucuugaaggucaaugagugauucauuuaaauuuuuagcgaccucauugaggcggucaauuucuuuuugaauguugacgacagaagcguuaaugccugaaaugucgccaagaucaacaucuggugauguaugauuuuugaaguacuuguccagcucuucuuugaaugagucaagcucagguugcagaggaucauaaacuguguuguuaaugaugccaauaacgacaucacaauuuccugagacaaauguauugucuguaguaauuauuuguggagaaaagaaguuccucuguguaauaaaccaagaagugccauuaaacacaaaaacaccuucacgagggaaguaugcuuugccuucaugacaaauugcuggcgcuguggugaaguuccucuccugggauggcacauacgugacauguaggaagacaacaccaugcggggcugcuugugggaaggacauaaggugguagcccuuuccacaaaagucaacucuuuuugauuguccaagaacacacucagacauuuuaguagcagcaagauuagcagaagcccugauuucagcagcccugauuaguuguuguguuacauagguuugaaggcuuugaagucugccuguaauuaaccugucaauuuguaccuccgccucgacuuuaucaagucgcgaaaggauaucauuuagcacacuugaaauugcaccaaaauuagagcuaaguuguuuaacaaguguguuuaaugcuugagcauucugguuaacaacgucuugcagcuugcccaaugcaguugauguuguuguaagugauucuugaauuugacuaaucgccuuguuaaauugguuggcgauuuguuuuugguucucauagagaacauuuuggguaacuccaaugccauugaaccuauaugccauuugcauagcaaaagguauuugaagagcagcgccagcaccaaauguccauccagcaguggcaguaccacuaacuagagcagcaguguaggcagcaaucauaucaucagugagcagagguggcaacacuguaaguccauugaacuucugcgcacaaaugagaucucuagcauuaauaucaccuaggcauucgccauauugcuucaugaagccagcaucagcgagugucaccuuauuaaagagcaaguccucaauaaaagaccucuuaguuggcuuuagagggucagguaauauuugugaaaaauuaaaaccaccaaaauauuucaaaguugggguuuuguacauuuguuugacuugagcgaacacuucacguguguugcgauccuguucagcagcaauaccugagagugcacgauuuaguugugugcaaaagcuaccauauuggagaagcaaauuagcacauucaguagaaucuccgcagauguacauauuacaaucuacggagguuuuagccauagaaacaggcauuacuucuguaguaaugcuaauugaaaaguuaguagguauagcaaugguguuauuagaguaagcaauugaacuaucagcaccuaaagacauaguauaagccacaauagauuuuuggcuaguacuacguaauaaagaaacuguaugguaacuagcacaaaugccagcuccaauaggaaugucgcacucauaagaagugucgacaugcucagcuccuauaagacagccugcuugagucuggaauacauuguuuccaguagaauauaugcgccaagcuggugugaguugaucugcaugaauugcuguagaaacaucagugcaguuaacaucuugauauagaacagcaacuucagaugaagcauuuguuccagguguaauuacacuuacacccccaaaagcgcaaggugaaaugucuaauauuucagauguuuuaggaucucgaacggaaucagugaaaucagaaacaucacggccaaauuguugaaaugguugaaaucucuuugaagaaggaguuaacacaccaguaccagugaguccauuaaaauuaaaauugacacacugguucuuaauaaggucaguggauaauuuugguccacaaaccguggccggugcauuuaaaaguucaaaagaaaguacuacaacucuguaagguugguagccaaugccaguagugguguaaaaaccauaaucauuuaauggccaauaacaauuaagagcagguggggugcaagguuugccaucaggggagaaaggcacauuagauaugucucucucaaagggccuaagcuugccaugucuaagauaccuauauuuauaauuauaauuaccaguugaaguagcaucaauguuccuaguauuccaagcaaggacacaacccaugaaaucaucuggcaauuuauaauuauaaucagcaauaacaccaguuuguccuggcgcuauuugucuuacaucaucucccuugacuacaaaagaaucugcauagacauuggagaagcaaagaucauucaacuuaguggcagaaacgccauagcacuuaaagguugaaaaaaauguugaguuguagagcacagaguaaucagcaacacaauuagaaauuuuuuuucucucccaugcauagacagaagggaauuuaguagcauuaaaaaccucuccaaaaggacacaaguuuguaauauuagggaaucucacaacaucuccugagggaacaacccugaaauuagaggucugguaaauuccuuugucaaucucaaagcucuuaacagagcauuugaguucagcaaguggauuuugagaacaaucaacagcaucugugauuguaccauuuucaucauacuugagcauaaauguaguuggcuuuaaauagccaacaaaauaggcugcagcugacgugccccaaaugucuugagcaggugaaaaggcuguaagaauggcucuaaaauuuguaauguuaauaccaagaggcaacuuaaaaauagguuucaaaguguuaaaaccagaagguagaucacgaacuacaucuauagguugauagcccuuauaaacauagagaaacccaucuuuauuuuuaaacacaaacucucguaaguguuuaaaauuaccugacuuuucugaaacaucaagcgaaaaggcaucagauauguacucgaaagugcaauuaaaugcauuaucgaauaucauaguaugugucuguguacccauggguuuagaaacagcaaagaaaggguugucacacaauucaaaguuacaugcucguauaacaacauuaguagaauuguuaauaauaaucaccgacugugacuuguuguucaugguagaaccaaaaacccaaccacggacaacauuugauuucucuguggcagcaaaauaaauaccauccuuaaaagguaugacaggguugccaaacguaugauuaauaguaugaaacccuguaacauuagaauaaaauggaagaaauaaauccugaguuaaauaaagagugucugaucuaaaaauuucaucaggauaguaaaccccccucauagaugaaguauguugaguguaauuaggagcuugaacaucaucaaaaguggugcaccggucaaggucacuaccacuagugagaguaagaaauaauaagaaaauaaacauguucguuuaguuguuaacaagaauaucacuugaaaccacaacucuguuguuuucucuaaugauaagccuaccuuuuuccagaagagaauaaaucauaucauugauuugauucuccuuaagagacauuacagcaguuccucuuaauuuaagaggaaauuugcucaugucaaagagugaauaggaagacaacuggauaggauuuguguuccuccagaaaauguaguuagcaugcaugguauagccaucaauuuguuccuucggcuugccaagauaguuagccccaauuaaaaaugcuuccgaugaugaugcauuuacauuuguaacaaaagcuguccaccaugagaaauggcccauaagcuuguaaaggucagcauuccaagaaugcucuguuaucuuuacagcuauagaaccacccagggcuaguuuuugcuuuauaaauccacacagauaagugaaaaacccuucuuuagagucauucucuuuugucacauguuugguccuagggucauacauaucgcuaauaauaaggucccauuuauuagccguauguacuguugcacagucuccaauuaaaguagaaucugcgucggagacgaagucauuaagaucugaaucgacaaguagugugccaguuggcaaccauugucugagcacagcuguaccuggugcaacuccuuuaucagagccagcaccaaagugaauaacucucauguuguaggguacagcuaaaguaaguguauuuaaguauugacacaguugaguauacuuugcgacauucaucauuauuccuuuugguauaacagcauuuucaccauaauucugaaggucacacuuuucaagaagcauucuuugcaucuuguacaaguuaggcaucgcaacaccugguugccacgcuugacuugcuuguaguuuuggguagaagguuucaacauguccauccuuacaccaaagcaugaaugaaauuucagcauagucaauuguaaccuugaccacuuuugaaaucacugacaaaucuugugacuuuauuaucucgacaaagucaucaaguaaaagaucaaucacagaacacacacauuuugaugaaccuguuugcgcaucuguuaugaaguaauuuuucacugugcuguccauagggauaaaauccucuaauuuaaguggugaaucuugugagcgcuuggcuaagccuaucauuaaaugaagaccgccaaguuguccaugacugaaaucuccauaaacgauguguucgaaggcauagcccucgagcuuauaucgcuguaugaauucauccauagcgagcucgagaaagucaguuuccauuugugaucugggcuuaaaauccucuaagucucugcucugaguaaaguagguuucaggcaacuguugaauaaugccgucuacuuucuuaaaguaguuaaacuguguuuuuacugauucuccaauuaaugugacuccauugacgcuagcuugugcuggucccuuugaagguguuagaccuuugacugaaccuucuguuauuaaaacaccauuacgggcguuucuaaaaaggucuaccuguccuuccacucuaccaucaaacaagacaguaagugaagaacaagcacucucaguagguuucuuggcaaugucagucauugugcagacaccuauuguagauacaugugcuggggcuucucuuuuguagucccagauuacaguauuagcagcgauaucaacacccaaauuauugaguaucuuaaucucuggcacugguuuaauguuacgcuuagcccaaagcucaaaugcaacauuaacaggaaguguugucuuauuuucaaagaucuccacaucaauaccaucuaccuuuguguaaacagcauuauuaaugauggaaacaggugcuucgccggcguguccaucaaaguguccuuuauuaacaacauuauaagccacauuuucuaaacucuguaaccugguaaauguauuccacagguuauaaguaucaaauuguuuguaaauccauaggcuaaauccagcagaaaucaucauauuauaugcauccaaguacugucgguacucauuugcauggugucugcaaacagcaccaccuaaauugcaucguguaauacacguagcagauuugaguggaacauaaucaauauccgacacuacuuguuugccaugagacucacaaggacuaucagaauaguaaaagaaaggcaauugcuuuaaauuaguaaaugcacuuuuaucgaaagcuggaguguggaaugcaugcuuauucacauacaaacuaccaccaucacagccugguaaguucaaguuugacaagacucuugugucaaaccuacacacaauugcauuggcuggguaacgaucaacguuacaauuccaaaacaaacaaacaccaucagugaauuuaucgugauguguagcauaagaauagaagaguuccucuauuuuguaagcuuugucacuacauggcugagcaucguagaacuuccauucuacuucagccugaggcacacacuugauagccuuuggauuuccaaugucaugaagaacuggaaacuuaucagcaagcaaugcagacuucacaaccauguguuguacuuuucugcaagcagaauuaacccucaguucaucuccuauaauaggguauucaacagaccaaucaacgcgcuuaacaaagcacucauggacugcuaaacaucuagucaugauagcaucacaacuagccacaugugcauuuccauguaccuggcaauguuggucaugguuacucugaagguuacccguaaagccccacugcugaacaucaaucauaaauggguuauagacauagucaaaacccacagaaugauuccagcaggcauaaguaucugaugaaguagaaaagcaaguugcacguuugucacacagacaacacguucuuucagguccaaucuugacaaaguacuucauugauguaagcucaaagccaugcgcccaaaggacgaacacgacucugucugacaauccuuucaguguaucacugagcauuuguacuaucuuaauacgcacuacauuccagggcaagccuuuauacaugagugguauaagauguuuaaacuggucaccugguggagguuuugcauuaacucuggugaauucuguguuauuuucagugucaacauaaccagucgguacagcuacuaaguuaacaccuguagaaaauccuagcuggagagguagguuaguacccacagcaucucuaguugcaugacagcccucuacaucaaagccaauccacgcacgaacgugacgaauagcuucuucgcgggugauaaacauauuaggguaaccauugacuugguaauucauuuugaaacccaucauagagaugagucuacgguaggucauguccuuugguaugccugguaugucaacacauaauccuucagucuugaacuuuauaucaacgcugagguguguaggugccuguguaggaugaagaccaguaaugaucuuacuacaguccuuaaaaaguccaguuacauuuucugcuuguaauguagccacauugcgacgugguauuucuagacuuguaaauugcaguuugucauaaagaucucuaucagacauuaugcacaaaaugccaauuuuugcccuugugauagccacauugaagcgguugacauuacaagagugugcuguuucaguaguuugugugaauaugacauagucauauucagaacccugugaugaaucaacagucugcguaggcaauccuaagauuuuugaagcuacagcguucugugaauuauaaggugagauaaaaacagcuuuucuccaagcaggauugcguguaagaaauucucuuacaacgccuauuugaggucuguugauugcagaugaaacaucauguguaauaacaccuuuguagaacauuuugaagcauugagcugacuuauccuugugugcuuuuagcuuauugucauaaacuaaagcacucacagugucaacaauuucagcaggacaacggcgacaaguuccaaggaacaugucuggaccuauuguuuucauaagucugcacacugaauuaaaauauucugguucuagugugccuuuagucagcaaugugcggggggcugguaauugagcaggaucgccaauauagacguaguguuuugcacgaagucuagcauugacaacacucaagucauaauuaguagccauagagauuucaucaaagacuacaaugucagcaguuguuucuggcaaugcauuuacagugcagaaaacauacuguucuaguguugaauucacuuugaauuuaucaaaacacucuacgcgcgcacgcgcagguaugauucuacuacauuuaucuaugggcaaauauuuuaaugccuuuucacauagggcaucaacagcugcaugagagcaugccguauacacuaugcgagcagauggguaauagagagcaaguccgauggcaaaaugacucuuaccaguaccaggugguccuuggaguguagaguacuuuugcaugccgaccuuuugauaauuugcaacauugcuagaaaacucaucugagauguugaguguuggguacaagccaguaauucucacauagugcucuuguggcacuagaguaggugcacuaaguggcauuacagugugagaugucaacacaaaguaaucaccaacauucaacuuguaugucguaguaccucuguacacaacagcaucaccauagucaccuuuuucaaagguguacucuccaaucuguacuuuacuauuuuuaguuacacgguaaccaguaaagacauaguuucuguucaaugguggucuagguuuuccaaccucccaugaaagaugcaauucucugucagagaguacuucgcguacaguggcaauaccauaugacagcuuaaauguuuccucaguggcuuugagcguuucugcugcgaaaagcuugagucucucaguacaaguguuggcaaguauguaaucgccagcauuaguccaaucacauguugcuaucgcauugaagucagugacauugucacugccuacacauguguuuuuguauaaaccaaaaaccugaccauuagcacauaauggaaaacuaaugggaggcuuaugugacuugcaauaauagcucauaccuccuagauacaguugugucacaucagugacaucacaaccuggggcauugcaaacauagggauuaacagacaacacuaauuugugugauguugaaaugacauggucauagcagcacuugcaacauaggaauggucuccuaauacaggcaccgcaacgaagugaagucugugaauugcacaauacacaagcaccuacagccugcaagacuguaugugguguguacauagccucauaaaacucagguucccaguaccgugagguguuaucauuaguuagcauuacggaauacauguccaacauguggccaguaagcucaucauguaacuuucuaauguauuguaaauacaagugaaagacaucagcauacuccugauuaggauguuuuguaaguggguaagcaucaauagccagugacacgaaccuuucaaucauaaguguaccaucuguuuugacaauaucaucgacaaaacagccugcgccuaauauucuugauggaucuggguaaggcagguacacguaaucaucuccuuguuuaacuagcauuguaugcugugagcaaaauucgugagguccuuuaguaaggucagucucaguccaacauuuugccucagacaugaacacauuauuuugauaauaaagaacugccuuaaaguucuuaaugcuagcuacuaaaccuugagccgcauaguuacuguuauagcacacaacggcaucaucagaaagaaucaucauggagaaauguuuacgcagguaagcguaaaacucauccacgaauucaugaucaacaucccuauuucuauagagacacucauagagccuguguuguagauugcggacauacuugucagcuaucuuauuaccaucaguugaaagaagugcauuuacauuggcuguaacagcuugacaaauguuaaagacacuauuagcauaagcaguuguagcaucaccggaugauguuccaccugguuuaacauauagugagccgccacacaugaccaucucacuuaauacuugcgcacacucguuagcuaaccuguagaaacggugugauaaguuacagcaaguguuauguuugcgagcaagaacaagagaggccauuauccuaagcauguuaggcauggcucugucacauuuuggauaaucccaacccauaagguguggaguuucuacaucacuguaaacaguuuuuaacauauuaugccagccaccguaaaacuugcuuguuccaauuaccacaguagcuccucuaguggcggcuauugacuucaauaauuucugaugaaacugucuauuugucauaguacuacagauagagacaccagcuacggugcgagcucuauucuuugcacuaauggcauacuuaagauucauuugaguuauaguagggaugacauuacgcuuaguauacgcgaaaagugcaucuugauccucauaacucauugagucauaauaaagucuagccuuaccccauuuauuaaaugggaaaccagcugauuuauccagauuguuaacgauuacuugguuggcauuaauacagccaccaucguaacaaucaaaguauuuaucaacaacuucaacuacgaauaggaguugucugauaucacacauuguuggcagauuauaacgauaauagucauaaucacugauagcagcguugccauccugagcaaagaagaaguguuuuaguucaacagaacuuccuuccuuaaagaaaccuuuagacacagcaaagucauaaaagucuuuauuaaaauuaccggguuugacaguuugaaaagcaacauuguuuguuagugcagcuacugaaaagcauguagugcguuuaucuagcaauaaauugccagaagcugcaugcauagcuggaucagcagcauacacuaaaaguuccuugaaacugagacgcgagcuauguaaguuuacauccugauuauguacgacuccuaacucacgaaaaugguauccaguugaaacaacaaaaggaacaccaucuacaaauauuuuucuuacuagugguccaaaacuuguagguggaaacacaguagaaaauaacacauuaaaguuugcacaaugaaggauacaccuaucauccaaacaguuaauacaauugggaugguaugucuggucccaauauuuaaaauaacggucgaagagacaaagucucucuuccguaaaaucauauuucagcaaaucccacuuaauaagugguuuugcgagaucagcauccauaugggacucagcagccaaugcccuagucaaagugaggaugggcaucagcaaugaguaauaugaauccacaauaggaacuccgcagccuggugcuacuuguacgaaaucaccgaaaucguaccaguucccauuaagauccugauuaucuaaugucaguacgccuacaaugccugcaucacgcauagcaucgcagaauuguacagucuuuaauaaugauuggcguacacgcucaccuaaguuagcauauacgcguaagaugucaggauucucuacgaagucauaccaauccuucuuauugaaauaaucaucaucacagcaauuguaugugacgaguauuucuuuuaauguaucacaauuacccucaucaaaaugacguagagcauagacuaaaucagccauuguguauuuaguuagacgcugacgugauauaugugguaccaugucaccaucuacucuaaacuugaaaaagucauggacagcaaccgcuggacaaucuuuaaccaaguuauaaauagucucuucauguugguaguuagacauaguaugccucuuaacuacaaaguaagagucuaauaaauugccuuccucauccuucuccuggaagcgacagcaauuaguuuuuaggaacuuugcaaaaccagcaacuuuuucguuguaaauaucaaaagcccuguagacgacaucaguacuagugccugugccgcacgguguaagacgggcugcacuuacaccgcaaacccguuuaaaaacguugaugcauccgcagacugcaucaaggguucgcggaguuggucacaacuacagccauaaccuuuccacauuccgcagacgguacagacuguguuucuaaguguaaaacccacugggucauuagcacaagugguagguauuuggacguacuuaccuuucaagucacagaauccuuuaggauuuggauggucaauguggcaucuacaauacagacaacaugaagcaccaccaaaggacucuugguccauguuagcuucugguguuacaguaauugccuguccuguaccaguguguguacacaacaucuucacacaguuggugauugguuguccuccacuugcuagguaauccuuauaugcuuuagcagggucuacugcaaaagcacagaaggaaagcacaguugaauuggcagguacuucuguagcauuuccagccugaagacguacuguagcagcuaaacugcccagcaccauaccucuauuuagguuguuuaagccuuugaugaaguacaaguauuucacuuuaggcccuuuuggugugucuguaacaaaccuacaaggugguuccaguucuguguaaauuguaccuguaccaucacucuuagggaaucuagcccauuugagaucuugguggucugauaguaaugccagcacaaaccuaccucccuucgaauuguuauaguaggcaagugcauugucaucaguacaagcuguuugugugguaccagccgcacaggacaucugucguagugcuacuggacucaguucauuauucuguaguuuaacagcugaguuggcucuuagagcuguaacaauaagaggccaagccaaauuuggugaauuguccauguuaauuucacuaaguugaacaaucuugcuauccgcaucaacaacuugcuggauuucccagagugcagaugcauauguaaagguguuaccaucacaaguguucuuguagguaccauaaucagggacaacaaccaugaguuuggcugcuguagucaaugguaugauguugaguggaacacaaccaucacgcgcauuguugauaauguuguuaagugcaucauuaucaagcuuccuaagcauagugaagagcauuguuugcauagcacuaguuacuuuugcccucuuguccucagaucuugccuguuuguacauuugggucauagccugaucugccaucuuuuccaacuugcguugcauggcagcaucacggucaaacucagauuuagccacauucaaagauuucuuuaacuuuuugagaacgacuucagaaucaccauuagcuacagccugcucauaggccuccugggcaguggcauaagcggcauaugaugguaaagaacuaaauucugaagcaauagccugaagaguagcacgguuaucgagcauuuccucgcacaaccuauuaaugucuacagcacccugcauggauagcaaaacagacaaaagagaaaccaucuucucgaaagcuucaguugugucuuuugcaagaagaauaucauuguggaguuguacacauugugcccacaauuuagaagaugacucuacucuaaguuguugaagaaccgagagcaguaccacagaugugcacuuuacgucagacauuuuagacuguacaguagcaaccuugauacaugguuuaccuccaauacccaacaacuuaauguuaagcuugaaagcaucaauacuacucuuaggaggcaaaagccccugggaguucauauaccuaaauucuuguguagagaccaaguagucauaaacaccaagaguaagccugaaguaacgguugaguaaacagaaaaggccaaaguagcagcagcaacaauagccuaagaaacaauaaacaagcaugauacacuguaagguguugccaguaauaaauaacaauggguaauacucaacacacacaaacacuauagcucuagcuaaaaacaugauagucguaacgacaccagaauaguuagagguuacagaaauaacuaaggcccacauggaaauagcuugaucuaaagcauuaccauaguagacuuuguaaacaaguguaaugacauucaucaguguccaaacacgucuagcagcaucaucauaaacagugcgagcugucaugagaauaagcaaaacuaaagcugaagcauacauaacacaauccuuaagccuauaaccagacaagcuagugucagccaauucaagccaugucaugauacgcaucacccagcuagcaggcauguagaccauauuaaaguaagcaacuguugcaagagaagguaacagaaacaagcacaagaaugcgugcuuaugcuuaacaagcagcauagcacaugcagcaauugccauaauaccaagaguaaauggcaagaaagcauucucguaaacaaagaaaaacagugaccacuguguacuuugaacaagaaucaauagugaugucaagaaaguuaaaagcauccaaugaugagugcccuuaacaauuuucuugaacuuaccuuggaagguaacaccagagcauugucuaacaacaucaaaugguguaaacucaucuucuaaaauagugcuaccaaggauaguacgaccauucauaccauucugcagcagcucuuucaaagcagcacacauaucuaagacggcaauuccuguuugagcagaaagaggucccaauaugucaacaugaucuugugucaaagguucauaguuguacuucauugccacaagguuaaagucauucaaaguaguggugaaucuauuaagaaaccaccuaucaccauugauaacagcagcauacagccaugccaaaacauuuaauguuaugguugugucuguaccugcagccugugcaguuugucugucaacaaauggaccauagaauuuaccuucuaagucaguaccagcguguacuccuguuggaagcuccauaugaugcauauagcagaaagacacgcaaucauaaucaauguuaaaaccaacacuaccacaugauccauuaaggaaagaaccuuuaaugguaugauuaggucucauggcacacugauaaacaccagauggugaaccauuguagcaugcuagaacugaaaauguuugaccagguuggauacggacaaauuuauacuugggugucuuaggguuagaaguaucaacuuuaagccuaagcagacaauuuugcauagaauggccaauaacacgaaguugaacauugccagccugaacaagaaagcuaugguuggauuugcgaaugagcagaucuucauaguuaggauuaagcaugucuucugcugugcaaaugacaugucuuggacaguauacugugucauccaaccacaauccauuaagaguuguaguuccacagguuacuuguaccaugcacccuucaacuuugccugacgggaaugccauuuuccuaaaaccacucugcagaacagcagaagugauugaugucuguggugguugguagagaacaucagcaccugaguugcuaaagucauuuagagccuuugcuaaguggcagcaagcugcuucacgauagcugguaguaucuaaggcuccacugaaauacuuguacuuguuauauagagcaagauaccuguuauacuguguaaguggcaacagugucucgcuacgcaauuuuagguacauuuccuuguugagcaaaaagguacacaaagcagccuccucgaagguacuaaauguaacuccauuaaacaugacucuuuuccuaagauaguuguuaaagaaccaauggcagugcuucagagaaauacagaauacauagauugcuguuauccaaaaaggcacaauaggagaaaacauggcaaaccauugaaggugagccaagaaugaaacaucauuggugaaauagaaugucaaguacaaguaaaagacugaguagacucccggcagaaagcuguaagcugguaccagacagaguauagugaaagacaucaaaaacaaaagugcauuagcagcaacaacaugguuguacucaccaaaaacacgucugaauuucauaaaguaguaggcagcacaagucaccaauauggcaauaauaccaccagccacuacugaagcagacacaucuaaagcacccacagguugcacaagaggaguaaagauguuagcuaugagauucaucgcaucaacaccacagaaaacuccugauagagcucuguaaugcucauuauuaagaacccaucuaccacugguagauaggcaaauaccuacuucugaccuuucgcauguaccaugucuacaguacucagcaucaaaaguuguuacuacucuaacagaacccuccagguaaguguuaggaaacuguaugauggaaccauccauaagcacauaacgagugucuggacgaagcucacuauaagaaauagaacccucuagcaaauuagugucauaacaauauggcacagguuugcccauagcauccuuaaaaauuguacacucagcagcaagaacgcaagcagagguagcaaaaucacuauacucaaugaguuuggaagguguguagcaaauguugccaacagcacuaaaaacacgagguagaaaaugcaagaagucaccauugauugcucucagcacaguacccgguaagccaggcacuaugaaaccaaucucucuuguaaugauagcagcuacuacagggcagcuuuugucauuuuuguaugaaccaccacgcuggcuaaaccaugcgucaaaaccagcauguuuauuugcaaaacaaucaucaguagaaaugaugucacgagugacaccauccugaauggcuuuguaaccaaugauuucauuuguguaaccaucauggauugacaauguauguacuggcauaacgauauaacaaaccaaugcagcaagaacgcacaauaauguggccuuaagcauaaguuuaaaacaaguacuaacaaucuuaccacccuugagugagauuuuaguaguuaugacauugacaaccugucuaguuguagcacaaguuagucuaaaagguauguuguucuucuuggcagcacuacgaauuuguuuacgcagcuguucagauaaagacauguagucuuuuacauuccagaugagugaaacauugugacuuuuugcuacuugggcauugauaugccuugcauuacagucaauacaugcgccaagaucucugggcgucauguuuucaaccuuauuauaggugagcaugaaauuguuacaacugucaccugucacuucuaagucagagugaugugaaaguuugagacauucaauaacauccuuugugucaacaucgguaucaacaacaccuugucgggcagcugacacgaauguagaaaggacaccaucuaaagcuacacccuuugcuaacucgcugugagcuguagcaacaagugccuuaaguuuuuccauaggaacacuaaaaguugcugaaaaggugucgacauaagcaucaaacaucuuaacggaaacuucaguacuaucuccaacgucugauacaagagcuuggucaagcaacagaauagguuggcacaucagcugacuguaguacacagaagcagacuuagaagcagacucgucgcauuuggacuugccaucaaaaacuaugacauuaauaggcagugaaccuuuaguguuguuagcucucaaauugucuaaauugacaaaaugggagagcggaugucucucauaggucuuuugaccagccuugucaaaguagaggugaagcgcgccauuuuucacagcaacacuaucaacaauauacgaugacuggucaguaggguugauuggucuuuuaaacuggagugacaaaucacgagcaacuucaucacuaaugaauguacuaccagugcaaaaugugucacaauugagacaauuccaauugugagucuugcagaagccacggccuccauuugcauagacauagaaagaucucuucaugccauuaacaauaguuguacacucaacgcguguggcacgauugcgcuuauagcacaucaugcaagucgaagaggugcaaccauccaugauaugaacauagcucuuccauauguaguagaaagaagcaaagaagauguacauccuaaccauugcagaaacgggugccauuuguacaauacuaaugauaaaccacaugagccaagaauugcugaugaaaugacuagcaaaauagccaaagaacaccugcauuauagcugaaagaccuaauaaauaaaagaauuuugugaacaacauauaugccaaaacccacucagcggccagaccuaaaauugucaagucuagcuuguacgaugaaaucgucaccugaaugguuucaagagcuggauaagaaucaagggagucuaauccacuuaaacaaaugcugcaaggaaaagaaccuucacagaaauccauaguaguaacguuagacgaauuaagauacaauucucuaacgccauuacaauaagaaggagcaccaaaauuagauaagaguacaccaaaagcagcaguuacacagauuagagaaccuaagcaaauacuuaacaacaauagccacauagcgauugugaacaauuuagaaaauuugggugacuucacauaauuaaugccggcauccaaacauaauuuagcaacacucuuaacacuauuuuuagcaauaguuguagguagugaagcucuaauucuagaauugguacuuuuaguaaaaguacacaauuggaacaauaauguaaacacauaaggcauauaauuguuaaacacacguugugcuaaucucuuagcgcaauuugauguuguaauugcugcuuguccuaagaaugguuugacauaagccaaaauuuuacuccaaggaacacuauuaauugcagcaauaccaugaguggcaauuguuuuuaaaccuaaggcuagugaaagcucauuagguuucuuaaugguaaugcuuguguuuuccacauaagcagccauaagauccucaugaccuaacucuuguguuacuuuaacaccuucaucugaugguuuaaguaugacauugccuacaacuucgguaguuuucacgucacacucuaugacuuccuucuguaugguaggauuuuccacuacuucuucagagguggguuguugacuuucacaagcaagauuguccauuccuugugugucuucuacugccagaacuucaaaugaauuugaaguaucuacuggcuuuguacuccaaagacaacguaaacaccaaguguuugguuugaacguugucuugguuguagccugguuaaugugccaaacaauuggcuuaugcaguaauuuagcaccuuucuugaaacucgcugaauagugucuauagucaauagccacuacaucgccauucaagucugggaagaaugugacagauagcucucgugaagcuggcuuugugaagccugucauuugauuuaaaucaucagcaaauuuuguguuagaacaugugaguuugaaauuaucaaaacucgcauuugguaaugguugaguugguacaaggucuauaggcugcucuguauaguaagcauuauccuuuuuauaauacccauccaauuuugguucaaucucuguguaaguaacuccaucgaguuuauacgacacaggcuugaugguuguaguguaagauguuuccuuguagaaaacaucagucacugguccuuuguacucugacaucuuuguaaggugagcuccgucaauacgauagagggucuccuuagcaguuauaugaguguaaugaccacacugauaguuaccaguguacucauucgcacauaagaauguaccuugcuguaauuuauacucagcagguggugcagacaucauaacaaaagaagacucuuguuguacuagauauuguguagcaucacgaccacacacacauggaauggaaacaccugucuuaagauuaucauaagauagaguacccauauacaucacagcuucuacacccguuaagguaguaguuuucugaccacaauguuuacacaccacauuaagaacucgcuuugcagauuccaaauuagcaugcuguagaagaugggucauaguuucucugacaucaccaagcucgccaacaguuuuauuacuguaagcgaguaugagugcacaaaaguuagcagcaucaccagcacgggcucuauaauaagccucuugaagugcuggugcauugaauuugacuucaagcuguugaagugcuaauaaaacacuagacaaauaacaauuguuaucagcccauuuaauugaaguuaaaccaccaacuugaggaaauuuccauuucuuugugugguuuaaagcagacauguaccuaccaagaaaacucucaucaagaguaugguaguacucgaaagcuucacuacguagugugucaucacuagguaguacaaagaaagucuuacccucaugauuuacaugagguuuaauuuuuguaacaucagcaccauccaaguauguuggaccaaacugcuguccauaugucauagacauauccacaagcuguguguggagauuaguguuguccacaguugugaacacuuuuauagucuuaaccucccgcagggauaagagacucuuuaguuugucaagugaaagaaccucaccgucaagaugaaacucgacggggcucuccagagugugguacacaauuuugucaccacgcuuaagaaauucaacaccuaacucuguacgcuguccugaauaggaccaaucucuguaagagccagccaaagaaacuguuucuacaaagugcuccucagaugucuuugaugacgaagugagguauccauuauauguaguaacagcaucuggugaugauacugacacuacggcaggagcuuuaagagaacgcauacagcgcgcagccucuucaagauuaaaaccaugugucacauaaccaauuggcauugugacaagcggcucauuuagagaguucagcuucguaauaauagaagcuacaggcucuuuacuaguauaaaagaagaaucggacaccauagucaacgaugcccucuugaauuuuaauuccuuuauacuuacguuggaugguugccauuauggcucuaacauccaugcauauaggcauuaauuuucuugucucuucagcaugagcaagcauuucucucaaauuccaggauacaguuccuagaaucucuuccuuagcauuaggugcuucugaagguaguacauaaaaugcagauuugcauuucuuaagagcagucuuagcuuccucaaguguauaaccagcacauccuuguccaggguacgugguuauauacucaucaacuggcacuuucuucaaagcucuugagagcaucucaguagugccaccagccuuuuuggaggguauuacaacacaagugauaucaccacuagugauaacaucaccuaccauguaaggugcauccuucucaaggaaagacauaucuucaccucuaagcauguucugagaaucaugguaaagcuuaccauugauaucagcaaacaagaguaacuuauugguaagaaacuuaguuucuuccaguguugugguaaccucaucaaugcaggccuuaauuuuuggcuucacaucgacaggcuucuguacgacagauuucuccucaguuuuggaaucuucuguguuugguggcuccucuuguuuaggugcuuccacucuaggcuucagguuaucaagauaauccaugacaaccugcucauaaagagcuuugucauugacugcaauauaaaccuguguacgaaccgucugcacgcacacuuguaaagacugaagugguuuagcaccaaauaugccugcugacaacaauggugcaaguaagauguccugugaauugaaauuuucauaugcugccuuaagaagcuggauguccucaccugcauuuagguuagguccaacaacaugcagacacuucuuagcaagauuauguccagaaagcaaacaagacccuccuacuguaagagggccauuuagcuuaauguaaucaucacucuccuuuugcauggcaccauugguugccuuguugagugcaccugcuacaccaccaccauguuucagguguauguuagcagcauuuacaaucaccauaggauuagcacuuugugccuccuuaacgaugucaacacauuuaauggcaacauugucaguaaguuuuaaauaaccaguaaacugauuaacugguucuucagguguagguucugguucuggcucaaucucugauugcucaguaguaucauccagccagucuuccucuucuucuuccucaacucgaacuguuucagcugaggcaccaaauuccagagggagaccuugauaaucauccucuguaccguacucauguucacagguuucaucaauuucuucuuccucacacucugcaucguccucuucuuccucaucuggaggguaaaaggaacaauacauacgugaugaaaaguuuucuucaccagcaucaucaaauaaguagaauguagcuacacuccacucaucaagaucaauacccauguugguaaggagaucagaaacugguuguaaagucuucacaacagccucugcuacaacacaugcaaacucaguaacuucgguaccggauucaacaguguagacagagcacuuuucauuaagcacuuugucaacacguucaucaagcucaaaugugauucucacauucuuguaaccuugaacuucccaaacaguaucuucuccaaagguuacaccuuuaauuggugcacccccuuuuaagcgaaagacauuguuuguagccaguaaaccaggagacaaugcgcaguauuguucuuuguccuuaaucucuaagagcaugaggccauuuacacagacuggugugccaacgauagcuccauuugugaagcuaucaacgggcgucucgagugcuucgaguucaccguucuugagaacaaccuccucagagguaaguacugugucaugugaaucaccuucaagaaagguuacuucuuuuggugccuuaagaggcaugaguaguugcagcugcuccuugccacguauacacugacgguaaagucccuugcuuugagcgaugaagacuucaccuaaguugagugaucgcaacuuugcgccagcgauagugacuugaucaaugcacauuucgagugccuuguuaacaacaucaaugaagcauuuuacacaauccuugauguuaucugaagcaaccuguauuugacccuugacgaugucaaaaacaccuguaaugagaaauuugagaaucucccaagcauccuugagaaauucaacuccugcacuaaguuucgccucaauccauucaaagauaggccugaguuuuucaacaguagugcccaaaagauuagacaaccacugagaagucuguuguacaagaccaccaguuacauaugccauaauaaugacacuguuggugagcaggucugaaguauaaaccauggcgucgacaagacguaaugacuguucagaaauaccaucaaguauggugacagcugcucuuugcaaaucaggaauugagugguuugcugcaucaagugugcgcgcaaaaauugaucugauaacaccagcagccugugagggaaaaccacacagugguguuaaaacugaucucuguuguccaauguuccaagcaccuuuuacgggcuuucccuugguaacuuuauaguuaccgcaggacucaacaaugguuuugaaagacuuguaaucaagacucuuuauagugucaauaaaggcacuuguagaagcagagaaagaugccaaaaugauggcaaccucuucauucaaaugaaaaucgccaacaauguuaauguuaacacguucacgacucaguaucucaaggagauccucauucaaggucuccacauugucaccaguaaugccaguauggccugagccaauaucagcacuagcacgaggaacccaguaggcacgcuuauuauagcagccaacauaggcaaacacacagccuccaaaacaucuaguccuaccucccuugcggagucgaguuucaauguuugagugguugugauaaucugcaacacuaugcucagguccaaucucugggucuugacaggcaggacauggcauuuucacuacagcauuaguagguagguacccacauguaguagguccuucaauaacuaaauuuucagugccacaauguucacaaguggcuuucagaaagucgcacgucugccaugaaacuucaucgcaaugauuacauuucaucaagguagacaagugcauauuguuacacuccuguggagaugcaacaggguacacagagcguauacgccccaugaaacccucagucuuuuucuuuucaacacgugguugaaugacuuugacuuuugaguuaagaggaaacacaaacuuugggcauuccccuuugaaagugucaaauuucuuggcacucuuaauuucgaagggugucuggugcucguagcucuuaucagagcgcucagugaaccaggcaauuucaugcucauggucacggcagcaguagacaccucucuucgacucgauguaaucaaguuguucggaaagagugcacauugacuugcccgcgcgugcgagaaaaucuuugaugcaaucaagaggguacccaucugggccacagaaauuguugucgacauagcgagugacugcaccuccauugagcucacgagugaguucacggagugcaccacugccaugcuuaguguuccaguuuuguucauaaucuucaaugggaucagugccaagcucgucaccuaagucauaagacuuuagaucgaugccauagcuaugaccaccggcucccuuauuaccguucuuacgaagaagaacauugcgguaugcaauugggguuucgcccacauguggcacgaguacucccaguguuauaccgcuacgaccguacugaaugccguccauuucugcaaccagcucaacgaccuuguggccgugauuggugcuuaaggcaucagaacguuuaaugaacacauagggcuguucaagcuggggcaguacgccuuuuuccagcucuacuagaccacaagugccauuuuugagguguucacgugccuccgauagggccucuuccacagaguccccgaagccacgcacuagcacgucucuaaccugaaggacaggcaaacugaguuggacguguguuuucucguugacaccaagaacaaggcucuccaucuuaccuuucggucacacccggacgaaaccuagguaugcugaugaucgacugcaacacggacgaaaccguaagcagucugcagaagagggacgaguuacucguuucuugucaacgacaguaaaauuuauuauuguuuauacugcguaggugcacuaggcaugcagccgagcgacagcuacacagauuuuaaaguucguuuagagaacagaucuacaagagaucgagguugguuggcuuuuccuggguagguaaaaaccuaauau

SEQ ID NO: 21 - protein, 7096 aa, Severe acute respiratory syndrome coronavirus 2 [sequence omitted]

SEQ ID NO: 22 - DNA, 13218 bp, Severe acute respiratory syndrome coronavirus 2
atggagagccttgtccctggtttcaacgagaaaacacacgtccaactcagtttgcctgttttacaggttcgcgacgtgctcgtacgtggctttggagactccgtggaggaggtcttatcagaggcacgtcaacatcttaaagatggcacttgtggcttagtagaagttgaaaaaggcgttttgcctcaacttgaacagccctatgtgttcatcaaacgttcggatgctcgaactgcacctcatggtcatgttatggttgagctggtagcagaactcgaaggcattcagtacggtcgtagtggtgagacacttggtgtccttgtccctcatgtgggcgaaataccagtggcttaccgcaaggttcttcttcgtaagaacggtaataaaggagctggtggccatagttacggcgccgatctaaagtcatttgacttaggcgacgagcttggcactgatccttatgaagattttcaagaaaactggaacactaaacatagcagtggtgttacccgtgaactcatgcgtgagcttaacggaggggcatacactcgctatgtcgataacaacttctgtggccctgatggctaccctcttgagtgcattaaagaccttctagcacgtgctggtaaagcttcatgcactttgtccgaacaactggactttattgacactaagaggggtgtatactgctgccgtgaacatgagcatgaaattgcttggtacacggaacgttctgaaaagagctatgaattgcagacaccttttgaaattaaattggcaaagaaatttgacaccttcaatggggaatgtccaaattttgtatttcccttaaattccataatcaagactattcaaccaagggttgaaaagaaaaagcttgatggctttatgggtagaattcgatctgtctatccagttgcgtcaccaaatgaatgcaaccaaatgtgcctttcaactctcatgaagtgtgatcattgtggtgaaacttcatggcagacgggcgattttgttaaagccacttgcgaattttgtggcactgagaatttgactaaagaaggtgccactacttgtggttacttaccccaaaatgctgttgttaaaatttattgtccagcatgtcacaattcagaagtaggacctgagcatagtcttgccgaataccataatgaatctggcttgaaaaccattcttcgtaagggtggtcgcactattgcctttggaggctgtgtgttctcttatgttggttgccataacaagtgtgcctattgggttccacgtgctagcgctaacataggttgtaaccatacaggtgttgttggagaaggttccgaaggtcttaatgacaaccttcttgaaatactccaaaaagagaaagtcaacatcaatattgttggtgactttaaacttaatgaagagatcgccattattttggcatctttttctgcttccacaagtgcttttgtggaaactgtgaaaggtttggattataaagcattcaaacaaattgttgaatcctgtggtaattttaaagttacaaaaggaaaagctaaaaaaggtgcctggaatattggtgaacagaaatcaatactgagtcctctttatgcatttgcatcagaggctgctcgtgttgtacgatcaattttctcccgcactcttgaaactgctcaaaattctgtgcgtgttttacagaaggccgctataacaatactagatggaatttcacagtattcactgagactcattgatgctatgatgttcacatctgatttggctactaacaatctagttgtaatggcctacattacaggtggtgttgttcagttgacttcgcagtggctaactaacatctttggcactgtttatgaaaaactcaaacccgtccttgattggcttgaagagaagtttaaggaaggtgtagagtttcttagagacggttgggaaattgttaaatttatctcaacctgtgcttgtgaaattgtcggtggacaaattgtcacctgtgcaaaggaaattaaggagagtgttcagacattctttaagcttgtaaataaatttttggctttgtgtgctgactctatcattattggtggagctaaacttaaagccttgaatttaggtgaaacatttgtcacgcactcaaagggattgtacagaaagtgtgttaaatccagagaagaaactggcctactcatgcctctaaaagccccaaaagaaattatcttcttagagggagaaacacttcccacagaagtgttaacagaggaagttgtcttgaaaactggtgatttacaaccattagaacaacctactagtgaagctgttgaagctccattggttggtacaccagtttgtattaacgggcttatgttgctcgaaatcaaagacacagaaaagtactgtgcccttgcacctaatatgatggtaacaaacaataccttcacactcaaaggcggtgcaccaacaaaggttacttttggtgatgacactgtgatagaagtgcaaggttacaagagtgtgaatatcacttttgaacttgatgaaaggattgataaagtacttaatgagaagtgctctgcctatacagttgaactcggtacagaagtaaatgagttcgcctgtgttgtggcagatgctgtcataaaaactttgcaaccagtatctgaattacttacaccactgggcattgatttagatgagtggagtatggctacatactacttatttgatgagtctggtgagtttaaattggcttcacatatgtattgttctttctaccctccagatgaggatgaagaagaaggtgattgtgaagaagaagagtttgagccatcaactcaatatgagtatggtactgaagatgattaccaaggtaaacctttggaatttggtgccacttctgctgctcttcaacctgaagaagagcaagaagaagattggttagatgatgatagtcaacaaactgttggtcaacaagacggcagtgaggacaatcagacaactactattcaaacaattgttgaggttcaacctcaattagagatggaacttacaccagttgttcagactattgaagtgaatagttttagtggttatttaaaacttactgacaatgtatacattaaaaatgcagacattgtggaagaagctaaaaaggtaaaaccaacagtggttgttaatgcagccaatgtttaccttaaacatggaggaggtgttgcaggagccttaaataaggctactaacaatgccatgcaagttgaatctgatgattacatagctactaatggaccacttaaagtgggtggtagttgtgttttaagcggacacaatcttgctaaacactgtcttcatgttgtcggcccaaatgttaacaaaggtgaagacattcaacttcttaagagtgcttatgaaaattttaatcagcacgaagttctacttgcaccattattatcagctggtatttttggtgctgaccctatacattctttaagagtttgtgtagatactgttcgcacaaatgtctacttagctgtctttgataaaaatctctatgacaaacttgtttcaagctttttggaaatgaagagtgaaaagcaagttgaacaaaagatcgctgagattcctaaagaggaagttaagccatttataactgaaagtaaaccttcagttgaacagagaaaacaagatgataagaaaatcaaagcttgtgttgaagaagttacaacaactctggaagaaactaagttcctcacagaaaacttgttactttatattgacattaatggcaatcttcatccagattctgccactcttgttagtgacattgacatcactttcttaaagaaagatgctccatatatagtgggtgatgttgttcaagagggtgttttaactgctgtggttatacctactaaaaaggctggtggcactactgaaatgctagcgaaagctttgagaaaagtgccaacagacaattatataaccacttacccgggtcagggtttaaatggttacactgtagaggaggcaaagacagtgcttaaaaagtgtaaaagtgccttttacattctaccatctattatctctaatgagaagcaagaaattcttggaactgtttcttggaatttgcgagaaatgcttgcacatgcagaagaaacacgcaaattaatgcctgtctgtgtggaaactaaagccatagtttcaactatacagcgtaaatataagggtattaaaatacaagagggtgtggttgattatggtgctagattttacttttacaccagtaaaacaactgtagcgtcacttatcaacacacttaacgatctaaatgaaactcttgttacaatgccacttggctatgtaacacatggcttaaatttggaagaagctgctcggtatatgagatctctcaaagtgccagctacagtttctgtttcttcacctgatgctgttacagcgtataatggttatcttacttcttcttctaaaacacctgaagaacattttattgaaaccatctcacttgctggttcctataaagattggtcctattctggacaatctacacaactaggtatagaatttcttaagagaggtgataaaagtgtatattacactagtaatcctaccacattccacctagatggtgaagttatcacctttgacaatcttaagacacttctttctttgagagaagtgaggactattaaggtgtttacaacagtagacaacattaacctccacacgcaagttgtggacatgtcaatgacatatggacaacagtttggtccaacttatttggatggagctgatgttactaaaataaaacctcataattcacatgaaggtaaaacattttatgttttacctaatgatgacactctacgtgttgaggcttttgagtactaccacacaactgatcctagttttctgggtaggtacatgtcagcattaaatcacactaaaaagtggaaatacccacaagttaatggtttaacttctattaaatgggcagataacaactgttatcttgccactgcattgttaacactccaacaaatagagttgaagtttaatccacctgctctacaagatgcttattacagagcaagggctggtgaagctgctaacttttgtgcacttatcttagcctactgtaataagacagtaggtgagttaggtgatgttagagaaacaatgagttacttgtttcaacatgccaatttagattcttgcaaaagagtcttgaacgtggtgtgtaaaacttgtggacaacagcagacaacccttaagggtgtagaagctgttatgtacatgggcacactttcttatgaacaatttaagaaaggtgttcagataccttgtacgtgtggtaaacaagctacaaaatatctagtacaacaggagtcaccttttgttatgatgtcagcaccacctgctcagtatgaacttaagcatggtacatttacttgtgctagtgagtacactggtaattaccagtgtggtcactataaacatataacttctaaagaaactttgtattgcatagacggtgctttacttacaaagtcctcagaatacaaaggtcctattacggatgttttctacaaagaaaacagttacacaacaaccataaaaccagttacttataaattggatggtgttgtttgtacagaaattgaccctaagttggacaattattataagaaagacaattcttatttcacagagcaaccaattgatcttgtaccaaaccaaccatatccaaacgcaagcttcgataattttaagtttgtatgtgataatatcaaatttgctgatgatttaaaccagttaactggttataagaaacctgcttcaagagagcttaaagttacatttttccctgacttaaatggtgatgtggtggctattgattataaacactacacaccctcttttaagaaaggagctaaattgttacataaacctattgtttggcatgttaacaatgcaactaataaagccacgtataaaccaaatacctggtgtatacgttgtctttggagcacaaaaccagttgaaacatcaaattcgtttgatgtactgaagtcagaggacgcgcagggaatggataatcttgcctgcgaagatctaaaaccagtctctgaagaagtagtggaaaatcctaccatacagaaagacgttcttgagtgtaatgtgaaaactaccgaagttgtaggagacattatacttaaaccagcaaataatagtttaaaaattacagaagaggttggccacacagatctaatggctgcttatgtagacaattctagtcttactattaagaaacctaatgaattatctagagtattaggtttgaaaacccttgctactcatggtttagctgctgttaatagtgtcccttgggatactatagctaattatgctaagccttttcttaacaaagttgttagtacaactactaacatagttacacggtgtttaaaccgtgtttgtactaattatatgccttatttctttactttattgctacaattgtgtacttttactagaagtacaaattctagaattaaagcatctatgccgactactatagcaaagaatactgttaagagtgtcggtaaattttgtctagaggcttcatttaattatttgaagtcacctaatttttctaaactgataaatattataatttggtttttactattaagtgtttgcctaggttctttaatctactcaaccgctgctttaggtgttttaatgtctaatttaggcatgccttcttactgtactggttacagagaaggctatttgaactctactaatgtcactattgcaacctactgtactggttctataccttgtagtgtttgtcttagtggtttagattctttagacacctatccttctttagaaactatacaaattaccatttcatcttttaaatgggatttaactgcttttggcttagttgcagagtggtttttggcatatattcttttcactaggtttttctatgtacttggattggctgcaatcatgcaattgtttttcagctattttgcagtacattttattagtaattcttggcttatgtggttaataattaatcttgtacaaatggccccgatttcagctatggttagaatgtacatcttctttgcatcattttattatgtatggaaaagttatgtgcatgttgtagacggttgtaattcatcaacttgtatgatgtgttacaaacgtaatagagcaacaagagtcgaatgtacaactattgttaatggtgttagaaggtccttttatgtctatgctaatggaggtaaaggcttttgcaaactacacaattggaattgtgttaattgtgatacattctgtgctggtagtacatttattagtgatgaagttgcgagagacttgtcactacagtttaaaagaccaataaatcctactgaccagtcttcttacatcgttgatagtgttacagtgaagaatggttccatccatctttactttgataaagctggtcaaaagacttatgaaagacattctctctctcattttgttaacttagacaacctgagagctaataacactaaaggttcattgcctattaatgttatagtttttgatggtaaatcaaaatgtgaagaatcatctgcaaaatcagcgtctgtttactacagtcagcttatgtgtcaacctatactgttactagatcaggcattagtgtctgatgttggtgatagtgcggaagttgcagttaaaatgtttgatgcttacgttaatacgttttcatcaacttttaacgtaccaatggaaaaactcaaaacactagttgcaactgcagaagctgaacttgcaaagaatgtgtccttagacaatgtcttatctacttttatttcagcagctcggcaagggtttgttgattcagatgtagaaactaaagatgttgttgaatgtcttaaattgtcacatcaatctgacatagaagttactggcgatagttgtaataactatatgctcacctataacaaagttgaaaacatgacaccccgtgaccttggtgcttgtattgactgtagtgcgcgtcatattaatgcgcaggtagcaaaaagtcacaacattgctttgatatggaacgttaaagatttcatgtcattgtctgaacaactacgaaaacaaatacgtagtgctgctaaaaagaataacttaccttttaagttgacatgtgcaactactagacaagttgttaatgttgtaacaacaaagatagcacttaagggtggtaaaattgttaataattggttgaagcagttaattaaagttacacttgtgttcctttttgttgctgctattttctatttaataacacctgttcatgtcatgtctaaacatactgacttttcaagtgaaatcataggatacaaggctattgatggtggtgtcactcgtgacatagcatctacagatacttgttttgctaacaaacatgctgattttgacacatggtttagccagcgtggtggtagttatactaatgacaaagcttgcccattgattgctgcagtcataacaagagaagtgggttttgtcgtgcctggtttgcctggcacgatattacgcacaactaatggtgactttttgcatttcttacctagagtttttagtgcagttggtaacatctgttacacaccatcaaaacttatagagtacactgactttgcaacatcagcttgtgttttggctgctgaatgtacaatttttaaagatgcttctggtaagccagtaccatattgttatgataccaatgtactagaaggttctgttgcttatgaaagtttacgccctgacacacgttatgtgctcatggatggctctattattcaatttcctaacacctaccttgaaggttctgttagagtggtaacaacttttgattctgagtactgtaggcacggcacttgtgaaagatcagaagctggtgtttgtgtatctactagtggtagatgggtacttaacaatgattattacagatctttaccaggagttttctgtggtgtagatgctgtaaatttacttactaatatgtttacaccactaattcaacctattggtgctttggacatatcagcatctatagtagctggtggtattgtagctatcgtagtaacatgccttgcctactattttatgaggtttagaagagcttttggtgaatacagtcatgtagttgcctttaatactttactattccttatgtcattcactgtactctgtttaacaccagtttactcattcttacctggtgtttattctgttatttacttgtacttgacattttatcttactaatgatgtttcttttttagcacatattcagtggatggttatgttcacacctttagtacctttctggataacaattgcttatatcatttgtatttccacaaagcatttctattggttctttagtaattacctaaagagacgtgtagtctttaatggtgtttcctttagtacttttgaagaagctgcgctgtgcacctttttgttaaataaagaaatgtatctaaagttgcgtagtgatgtgctattacctcttacgcaatataatagatacttagctctttataataagtacaagtattttagtggagcaatggatacaactagctacagagaagctgcttgttgtcatctcgcaaaggctctcaatgacttcagtaactcaggttctgatgttctttaccaaccaccacaaacctctatcacctcagctgttttgcagagtggttttagaaaaatggcattcccatctggtaaagttgagggttgtatggtacaagtaacttgtggtacaactacacttaacggtctttggcttgatgacgtagtttactgtccaagacatgtgatctgcacctctgaagacatgcttaaccctaattatgaagatttactcattcgtaagtctaatcataatttcttggtacaggctggtaatgttcaactcagggttattggacattctatgcaaaattgtgtacttaagcttaaggttgatacagccaatcctaagacacctaagtataagtttgttcgcattcaaccaggacagactttttcagtgttagcttgttacaatggttcaccatctggtgtttaccaatgtgctatgaggcccaatttcactattaagggttcattccttaatggttcatgtggtagtgttggttttaacatagattatgactgtgtctctttttgttacatgcaccatatggaattaccaactggagttcatgctggcacagacttagaaggtaacttttatggaccttttgttgacaggcaaacagcacaagcagctggtacggacacaactattacagttaatgttttagcttggttgtacgctgctgttataaatggagacaggtggtttctcaatcgatttaccacaactcttaatgactttaaccttgtggctatgaagtacaattatgaacctctaacacaagaccatgttgacatactaggacctctttctgctcaaactggaattgccgttttagatatgtgtgcttcattaaaagaattactgcaaaatggtatgaatggacgtaccatattgggtagtgctttattagaagatgaatttacaccttttgatgttgttagacaatgctcaggtgttactttccaaagtgcagtgaaaagaacaatcaagggtacacaccactggttgttactcacaattttgacttcacttttagttttagtccagagtactcaatggtctttgttcttttttttgtatgaaaatgcctttttaccttttgctatgggtattattgctatgtctgcttttgcaatgatgtttgtcaaacataagcatgcatttctctgtttgtttttgttaccttctcttgccactgtagcttattttaatatggtctatatgcctgctagttgggtgatgcgtattatgacatggttggatatggttgatactagtttgtctggttttaagctaaaagactgtgttatgtatgcatcagctgtagtgttactaatccttatgacagcaagaactgtgtatgatgatggtgctaggagagtgtggacacttatgaatgtcttgacactcgtttataaagtttattatggtaatgctttagatcaagccatttccatgtgggctcttataatctctgttacttctaactactcaggtgtagttacaactgtcatgtttttggccagaggtattgtttttatgtgtgttgagtattgccctattttcttcataactggtaatacacttcagtgtataatgctagtttattgtttcttaggctatttttgtacttgttactttggcctcttttgtttactcaaccgctactttagactgactcttggtgtttatgattacttagtttctacacaggagtttagatatatgaattcacagggactactcccacccaagaatagcatagatgccttcaaactcaacattaaattgttgggtgttggtggcaaaccttgtatcaaagtagccactgtacagtctaaaatgtcagatgtaaagtgcacatcagtagtcttactctcagttttgcaacaactcagagtagaatcatcatctaaattgtgggctcaatgtgtccagttacacaatgacattctcttagctaaagatactactgaagcctttgaaaaaatggtttcactactttctgttttgctttccatgcagggtgctgtagacataaacaagctttgtgaagaaatgctggacaacagggcaaccttacaagctatagcctcagagtttagttcccttccatcatatgcagcttttgctactgctcaagaagcttatgagcaggctgttgctaatggtgattctgaagttgttcttaaaaagttgaagaagtctttgaatgtggctaaatctgaatttgaccgtgatgcagccatgcaacgtaagttggaaaagatggctgatcaagctatgacccaaatgtataaacaggctagatctgaggacaagagggcaaaagttactagtgctatgcagacaatgcttttcactatgcttagaaagttggataatgatgcactcaacaacattatcaacaatgcaagagatggttgtgttcccttgaacataatacctcttacaacagcagccaaactaatggttgtcataccagactataacacatataaaaatacgtgtgatggtacaacatttacttatgcatcagcattgtgggaaatccaacaggttgtagatgcagatagtaaaattgttcaacttagtgaaattagtatggacaattcacctaatttagcatggcctcttattgtaacagctttaagggccaattctgctgtcaaattacagaataatgagcttagtcctgttgcactacgacagatgtcttgtgctgccggtactacacaaactgcttgcactgatgacaatgcgttagcttactacaacacaacaaagggaggtaggtttgtacttgcactgttatccgatttacaggatttgaaatgggctagattccctaagagtgatggaactggtactatctatacagaactggaaccaccttgtaggtttgttacagacacacctaaaggtcctaaagtgaagtatttatactttattaaaggattaaacaacctaaatagaggtatggtacttggtagtttagctgccacagtacgtctacaagctggtaatgcaacagaagtgcctgccaattcaactgtattatctttctgtgcttttgctgtagatgctgctaaagcttacaaagattatctagctagtgggggacaaccaatcactaattgtgttaagatgttgtgtacacacactggtactggtcaggcaataacagttacaccggaagccaatatggatcaagaatcctttggtggtgcatcgtgttgtctgtactgccgttgccacatagatcatccaaatcctaaaggattttgtgacttaaaaggtaagtatgtacaaatacctacaacttgtgctaatgaccctgtgggttttacacttaaaaacacagtctgtaccgtctgcggtatgtggaaaggttatggctgtagttgtgatcaactccgcgaacccatgcttcagtcagctgatgcacaatcgtttttaaacgggtttgcggtgtaa

SEQ ID NO: 23 - protein, 4405 aa, Severe acute respiratory syndrome coronavirus 2 [sequence omitted]

SEQ ID NO: 24 - DNA, 3822 bp, Severe acute respiratory syndrome coronavirus 2
atgtttgtttttcttgttttattgccactagtctctagtcagtgtgttaatcttacaaccagaactcaattaccccctgcatacactaattctttcacacgtggtgtttattaccctgacaaagttttcagatcctcagttttacattcaactcaggacttgttcttacctttcttttccaatgttacttggttccatgctatacatgtctctgggaccaatggtactaagaggtttgataaccctgtcctaccatttaatgatggtgtttattttgcttccactgagaagtctaacataataagaggctggatttttggtactactttagattcgaagacccagtccctacttattgttaataacgctactaatgttgttattaaagtctgtgaatttcaattttgtaatgatccatttttgggtgtttattaccacaaaaacaacaaaagttggatggaaagtgagttcagagtttattctagtgcgaataattgcacttttgaatatgtctctcagccttttcttatggaccttgaaggaaaacagggtaatttcaaaaatcttagggaatttgtgtttaagaatattgatggttattttaaaatatattctaagcacacgcctattaatttagtgcgtgatctccctcagggtttttcggctttagaaccattggtagatttgccaataggtattaacatcactaggtttcaaactttacttgctttacatagaagttatttgactcctggtgattcttcttcaggttggacagctggtgctgcagcttattatgtgggttatcttcaacctaggacttttctattaaaatataatgaaaatggaaccattacagatgctgtagactgtgcacttgaccctctctcagaaacaaagtgtacgttgaaatccttcactgtagaaaaaggaatctatcaaacttctaactttagagtccaaccaacagaatctattgttagatttcctaatattacaaacttgtgcccttttggtgaagtttttaacgccaccagatttgcatctgtttatgcttggaacaggaagagaatcagcaactgtgttgctgattattctgtcctatataattccgcatcattttccacttttaagtgttatggagtgtctcctactaaattaaatgatctctgctttactaatgtctatgcagattcatttgtaattagaggtgatgaagtcagacaaatcgctccagggcaaactggaaagattgctgattataattataaattaccagatgattttacaggctgcgttatagcttggaattctaacaatcttgattctaaggttggtggtaattataattacctgtatagattgtttaggaagtctaatctcaaaccttttgagagagatatttcaactgaaatctatcaggccggtagcacaccttgtaatggtgttgaaggttttaattgttactttcctttacaatcatatggtttccaacccactaatggtgttggttaccaaccatacagagtagtagtactttcttttgaacttctacatgcaccagcaactgtttgtggacctaaaaagtctactaatttggttaaaaacaaatgtgtcaatttcaacttcaatggtttaacaggcacaggtgttcttactgagtctaacaaaaagtttctgcctttccaacaatttggcagagacattgctgacactactgatgctgtccgtgatccacagacacttgagattcttgacattacaccatgttcttttggtggtgtcagtgttataacaccaggaacaaatacttctaaccaggttgctgttctttatcaggatgttaactgcacagaagtccctgttgctattcatgcagatcaacttactcctacttggcgtgtttattctacaggttctaatgtttttcaaacacgtgcaggctgtttaataggggctgaacatgtcaacaactcatatgagtgtgacatacccattggtgcaggtatatgcgctagttatcagactcagactaattctcctcggcgggcacgtagtgtagctagtcaatccatcattgcctacactatgtcacttggtgcagaaaattcagttgcttactctaataactctattgccatacccacaaattttactattagtgttaccacagaaattctaccagtgtctatgaccaagacatcagtagattgtacaatgtacatttgtggtgattcaactgaatgcagcaatcttttgttgcaatatggcagtttttgtacacaattaaaccgtgctttaactggaatagctgttgaacaagacaaaaacacccaagaagtttttgcacaagtcaaacaaatttacaaaacaccaccaattaaagattttggtggttttaatttttcacaaatattaccagatccatcaaaaccaagcaagaggtcatttattgaagatctacttttcaacaaagtgacacttgcagatgctggcttcatcaaacaatatggtgattgccttggtgatattgctgctagagacctcatttgtgcacaaaagtttaacggccttactgttttgccacctttgctcacagatgaaatgattgctcaatacacttctgcactgttagcgggtacaatcacttctggttggacctttggtgcaggtgctgcattacaaataccatttgctatgcaaatggcttataggtttaatggtattggagttacacagaatgttctctatgagaaccaaaaattgattgccaaccaatttaatagtgctattggcaaaattcaagactcactttcttccacagcaagtgcacttggaaaacttcaagatgtggtcaaccaaaatgcacaagctttaaacacgcttgttaaacaacttagctccaattttggtgcaatttcaagtgttttaaatgatatcctttcacgtcttgacaaagttgaggctgaagtgcaaattgataggttgatcacaggcagacttcaaagtttgcagacatatgtgactcaacaattaattagagctgcagaaatcagagcttctgctaatcttgctgctactaaaatgtcagagtgtgtacttggacaatcaaaaagagttgatttttgtggaaagggctatcatcttatgtccttccctcagtcagcacctcatggtgtagtcttcttgcatgtgacttatgtccctgcacaagaaaagaacttcacaactgctcctgccatttgtcatgatggaaaagcacactttcctcgtgaaggtgtctttgtttcaaatggcacacactggtttgtaacacaaaggaatttttatgaaccacaaatcattactacagacaacacatttgtgtctggtaactgtgatgttgtaataggaattgtcaacaacacagtttatgatcctttgcaacctgaattagactcattcaaggaggagttagataaatattttaagaatcatacatcaccagatgttgatttaggtgacatctctggcattaatgcttcagttgtaaacattcaaaaagaaattgaccgcctcaatgaggttgccaagaatttaaatgaatctctcatcgatctccaagaacttggaaagtatgagcagtatataaaatggccatggtacatttggctaggttttatagctggcttgattgccatagtaatggtgacaattatgctttgctgtatgaccagttgctgtagttgtctcaagggctgttgttcttgtggatcctgctgcaaatttgatgaagacgactctgagccagtgctcaaaggagtcaaattacattacacataa

SEQ ID NO: 25 - DNA, 828 bp, Severe acute respiratory syndrome coronavirus 2
atggatttgtttatgagaatcttcacaattggaactgtaactttgaagcaaggtgaaatcaaggatgctactccttcagattttgttcgcgctactgcaacgataccgatacaagcctcactccctttcggatggcttattgttggcgttgcacttcttgctgtttttcagagcgcttccaaaatcataaccctcaaaaagagatggcaactagcactctccaagggtgttcactttgtttgcaacttgctgttgttgtttgtaacagtttactcacaccttttgctcgttgctgctggccttgaagccccttttctctatctttatgctttagtctacttcttgcagagtataaactttgtaagaataataatgaggctttggctttgctggaaatgccgttccaaaaacccattactttatgatgccaactattttctttgctggcatactaattgttacgactattgtataccttacaatagtgtaacttcttcaattgtcattacttcaggtgatggcacaacaagtcctatttctgaacatgactaccagattggtggttatactgaaaaatgggaatctggagtaaaagactgtgttgtattacacagttacttcacttcagactattaccagctgtactcaactcaattgagtacagacactggtgttgaacatgttaccttcttcatctacaataaaattgttgatgagcctgaagaacatgtccaaattcacacaatcgacggttcatccggagttgttaatccagtaatggaaccaatttatgatgaaccgacgacgactactagcgtgcctttgtaa

SEQ ID NO: 26 - protein, 275 aa, Severe acute respiratory syndrome coronavirus 2
MDLFMRIFTIGTVTLKQGEIKDATPSDFVRATATIPIQASLPFGWLIVGVALLAVFQSASKIITLKKRWQLALSKGVHFVCNLLLLFVTVYSHLLLVAAGLEAPFLYLYALVYFLQSINFVRIIMRLWLCWKCRSKNPLLYDANYFLCWHTNCYDYCIPYNSVTSSIVITSGDGTTSPISEHDYQIGGYTEKWESGVKDCVVLHSYFTSDYYQLYSTQLSTDTGVEHVTFFIYNKIVDEPEEHVQIHTIDGSSGVVNPVMEPIYDEPTTTTSVPL

SEQ ID NO: 27 - DNA, 228 bp, Severe acute respiratory syndrome coronavirus 2
atgtactcattcgtttcggaagagacaggtacgttaatagttaatagcgtacttctttttcttgctttcgtggtattcttgctagttacactagccatccttactgcgcttcgattgtgtgcgtactgctgcaatattgttaacgtgagtcttgtaaaaccttctttttacgtttactctcgtgttaaaaatctgaattcttctagagttcctgatcttctggtctaa

SEQ ID NO: 28 - protein, 75 aa, Severe acute respiratory syndrome coronavirus 2
MYSFVSEETGTLIVNSVLLFLAFVVFLLVTLAILTALRLCAYCCNIVNVSLVKPSFYVYSRVKNLNSSRVPDLLV

SEQ ID NO: 29 - DNA, 669 bp, Severe acute respiratory syndrome coronavirus 2
atggcagattccaacggtactattaccgttgaagagcttaaaaagctccttgaacaatggaacctagtaataggtttcctattccttacatggatttgtcttctacaatttgcctatgccaacaggaataggtttttgtatataattaagttaattttcctctggctgttatggccagtaactttagcttgttttgtgcttgctgctgtttacagaataaattggatcaccggtggaattgctatcgcaatggcttgtcttgtaggcttgatgtggctcagctacttcattgcttctttcagactgtttgcgcgtacgcgttccatgtggtcattcaatccagaaactaacattcttctcaacgtgccactccatggcactattctgaccagaccgcttctagaaagtgaactcgtaatcggagctgtgatccttcgtggacatcttcgtattgctggacaccatctaggacgctgtgacatcaaggacctgcctaaagaaatcactgttgctacatcacgaacgctttcttattacaaattgggagcttcgcagcgtgtagcaggtgactcaggttttgctgcatacagtcgctacaggattggcaactataaattaaacacagaccattccagtagcagtgacaatattgctttgcttgtacagtaa

SEQ ID NO: 30 - protein, 222 aa, Severe acute respiratory syndrome coronavirus 2
MADSNGTITVEELKKLLEQWNLVIGFLFLTWICLLQFAYANRNRFLYIIKLIFLWLLWPVTLACFVLAAVYRINWITGGIAIAMACLVGLMWLSYFIASFRLFARTRSMWSFNPETNILLNVPLHGTILTRPLLESELVIGAVILRGHLRIAGHHLGRCDIKDLPKEITVATSRTLSYYKLGASQRVAGDSGFAAYSRYRIGNYKLNTDHSSSSDNIALLVQ

SEQ ID NO: 31 - DNA, 186 bp, Severe acute respiratory syndrome coronavirus 2
atgtttcatctcgttgactttcaggttactatagcagagatattactaattattatgaggacttttaaagtttccatttggaatcttgattacatcataaacctcataattaaaaatttatctaagtcactaactgagaataaatattctcaattagatgaagagcaaccaatggagattgattaa

SEQ ID NO: 32 - protein, 61 aa, Severe acute respiratory syndrome coronavirus 2
MFHLVDFQVTIAEILLIIMRTFKVSIWNLDYIINLIIKNLSKSLTENKYSQLDEEQPMEID

SEQ ID NO: 33 - DNA, 366 bp, Severe acute respiratory syndrome coronavirus 2
atgaaaattattcttttcttggcactgataacactcgctacttgtgagctttatcactaccaagagtgtgttagaggtacaacagtacttttaaaagaaccttgctcttctggaacatacgagggcaattcaccatttcatcctctagctgataacaaatttgcactgacttgctttagcactcaatttgcttttgcttgtcctgacggcgtaaaacacgtctatcagttacgtgccagatcagtttcacctaaactgttcatcagacaagaggaagttcaagaactttactctccaatttttcttattgttgcggcaatagtgtttataacactttgcttcacactcaaaagaaagacagaatga

SEQ ID NO: 34 - protein, 121 aa, Severe acute respiratory syndrome coronavirus 2
MKIILFLALITLATCELYHYQECVRGTTVLLKEPCSSGTYEGNSPFHPLADNKFALTCFSTQFAFACPDGVKHVYQLRARSVSPKLFIRQEEVQELYSPIFLIVAAIVFITLCFTLKRKTE

SEQ ID NO: 35 - DNA, 132 bp, Severe acute respiratory syndrome coronavirus 2
atgattgaactttcattaattgacttctatttgtgctttttagcctttctgctattccttgttttaattatgcttattatcttttggttctcacttgaactgcaagatcataatgaaacttgtcacgcctaa

SEQ ID NO: 36 - protein, 43 aa, Severe acute respiratory syndrome coronavirus 2
MIELSLIDFYLCFLAFLLFLVLIMLIIFWFSLELQDHNETCHA

SEQ ID NO: 37 - DNA, 366 bp, Severe acute respiratory syndrome coronavirus 2
atgaaatttcttgttttcttaggaatcatcacaactgtagctgcatttcaccaagaatgtagtttacagtcatgtactcaacatcaaccatatgtagttgatgacccgtgtcctattcacttctattctaaatggtatattagagtaggagctagaaaatcagcacctttaattgaattgtgcgtggatgaggctggttctaaatcacccattcagtacatcgatatcggtaattatacagtttcctgtttaccttttacaattaattgccaggaacctaaattgggtagtcttgtagtgcgttgttcgttctatgaagactttttagagtatcatgacgttcgtgttgttttagatttcatctaa

SEQ ID NO: 38 - protein, 121 aa, Severe acute respiratory syndrome coronavirus 2
MKFLVFLGIITTVAAFHQECSLQSCTQHQPYVVDDPCPIHFYSKWYIRVGARKSAPLIELCVDEAGSKSPIQYIDIGNYTVSCLPFTINCQEPKLGSLVVRCSFYEDFLEYHDVRVVLDFI

SEQ ID NO: 39 - DNA, 1260 bp, Severe acute respiratory syndrome coronavirus 2
atgtctgataatggaccccaaaatcagcgaaatgcaccccgcattacgtttggtggaccctcagattcaactggcagtaaccagaatggagaacgcagtggggcgcgatcaaaacaacgtcggccccaaggtttacccaataatactgcgtcttggttcaccgctctcactcaacatggcaaggaagaccttaaattccctcgaggacaaggcgttccaattaacaccaatagcagtccagatgaccaaattggctactaccgaagagctaccagacgaattcgtggtggtgacggtaaaatgaaagatctcagtccaagatggtatttctactacctaggaactgggccagaagctggacttccctatggtgctaacaaagacggcatcatatgggttgcaactgagggagccttgaatacaccaaaagatcacattggcacccgcaatcctgctaacaatgctgcaatcgtgctacaacttcctcaaggaacaacattgccaaaaggcttctacgcagaagggagcagaggcggcagtcaagcctcttctcgttcctcatcacgtagtcgcaacagttcaagaaattcaactccaggcagcagtaggggaacttctcctgctagaatggctggcaatggcggtgatgctgctcttgctttgctgctgcttgacagattgaaccagcttgagagcaaaatgtctggtaaaggccaacaacaacaaggccaaactgtcactaagaaatctgctgctgaggcttctaagaagcctcggcaaaaacgtactgccactaaagcatacaatgtaacacaagctttcggcagacgtggtccagaacaaacccaaggaaattttggggaccaggaactaatcagacaaggaactgattacaaacattggccgcaaattgcacaatttgcccccagcgcttcagcgttcttcggaatgtcgcgcattggcatggaagtcacaccttcgggaacgtggttgacctacacaggtgccatcaaattggatgacaaagatccaaatttcaaagatcaagtcattttgctgaataagcatattgacgcatacaaaacattcccaccaacagagcctaaaaaggacaaaaagaagaaggctgatgaaactcaagccttaccgcagagacagaagaaacagcaaactgtgactcttcttcctgctgcagatttggatgatttctccaaacaattgcaacaatccatgagcagtgctgactcaactcaggcctaa

SEQ ID NO: 40 - protein, 419 aa, Severe acute respiratory syndrome coronavirus 2
MSDNGPQNQRNAPRITFGGPSDSTGSNQNGERSGARSKQRRPQGLPNNTASWFTALTQHGKEDLKFPRGQGVPINTNSSPDDQIGYYRRATRRIRGGDGKMKDLSPRWYFYYLGTGPEAGLPYGANKDGIIWVATEGALNTPKDHIGTRNPANNAAIVLQLPQGTTLPKGFYAEGSRGGSQASSRSSSRSRNSSRNSTPGSSRGTSPARMAGNGGDAALALLLLDRLNQLESKMSGKGQQQQGQTVTKKSAAEASKKPRQKRTATKAYNVTQAFGRRGPEQTQGNFGDQELIRQGTDYKHWPQIAQFAPSASAFFGMSRIGMEVTPSGTWLTYTGAIKLDDKDPNFKDQVILLNKHIDAYKTFPPTEPKKDKKKKADETQALPQRQKKQQTVTLLPAADLDDFSKQLQQSMSSADSTQA

SEQ ID NO: 41 - DNA, 117 bp, Severe acute respiratory syndrome coronavirus 2
atgggctatataaacgttttcgcttttccgtttacgatatatagtctactcttgtgcagaatgaattctcgtaactacatagcacaagtagatgtagttaactttaatctcacatag

SEQ ID NO: 42 - protein, 38 aa, Severe acute respiratory syndrome coronavirus 2
MGYINVFAFPFTIYSLLLCRMNSRNYIAQVDVVNFNLT

SEQ ID NO: 43 - DNA, 21282 bp, Severe acute respiratory syndrome coronavirus 2
atggagagccttgtccctggtttcaacgagaaaacacacgtccaactcagtttgcctgttttacaggttcgcgacgtgctcgtacgtggctttggagactccgtggaggaggtcttatcagaggcacgtcaacatcttaaagatggcacttgtggcttagtagaagttgaaaaaggcgttttgcctcaacttgaacagccctatgtgttcatcaaacgttcggatgctcgaactgcacctcatggtcatgttatggttgagctggtagcagaactcgaaggcattcagtacggtcgtagtggtgagacacttggtgtccttgtccctcatgtgggcgaaataccagtggcttaccgcaaggttcttcttcgtaagaacggtaataaaggagctggtggccatagttacggcgccgatctaaagtcatttgacttaggcgacgagcttggcactgatccttatgaagattttcaagaaaactggaacactaaacatagcagtggtgttacccgtgaactcatgcgtgagcttaacggaggggcatacactcgctatgtcgataacaacttctgtggccctgatggctaccctcttgagtgcattaaagaccttctagcacgtgctggtaaagcttcatgcactttgtctgaacaactggactttattgacactaagaggggtgtatactgctgccgtgaacatgagcatgaaattgcttggtacacggaacgttctgaaaagagctatgaattgcagacaccttttgaaattaaattggcaaagaaatttgacaccttcaatggggaatgtccaaattttgtatttcccttaaattccataatcaagactattcaaccaagggttgaaaagaaaaagcttgatggctttatgggtagaattcgatctgtctatccagttgcgtcaccaaatgaatgcaaccaaatgtgcctttcaactctcatgaagtgtgatcattgtggtgaaacttcatggcagacgggcgattttgttaaagccacttgcgaattttgtggcactgagaatttgactaaagaaggtgccactacttgtggttacttaccccaaaatgctgttgttaaaatttattgtccagcatgtcacaattcagaagtaggacctgagcatagtcttgccgaataccataatgaatctggcttgaaaaccattcttcgtaagggtggtcgcactattgcctttggaggctgtgtgttctcttatgttggttgccataacaagtgtgcctattgggttccacgtgctagcgctaacataggttgtaaccatacaggtgttgttggagaaggttccgaaggtcttaatgacaaccttcttgaaatactccaaaaagagaaagtcaacatcaatattgttggtgactttaaacttaatgaagagatcgccattattttggcatctttttctgcttccacaagtgcttttgtggaaactgtgaaaggtttggattataaagcattcaaacaaattgttgaatcctgtggtaattttaaagttacaaaaggaaaagctaaaaaaggtgcctggaatattggtgaacagaaatcaatactgagtcctctttatgcatttgcatcagaggctgctcgtgttgtacgatcaattttctcccgcactcttgaaactgctcaaaattctgtgcgtgttttacagaaggccgctataacaatactagatggaatttcacagtattcactgagactcattgatgctatgatgttcacatctgatttggctactaacaatctagttgtaatggcctacattacaggtggtgttgttcagttgacttcgcagtggctaactaacatctttggcactgtttatgaaaaactcaaacccgtccttgattggcttgaagagaagtttaaggaaggtgtagagtttcttagagacggttgggaaattgttaaatttatctcaacctgtgcttgtgaaattgtcggtggacaaattgtcacctgtgcaaaggaaattaaggagagtgttcagacattctttaagcttgtaaataaatttttggctttgtgtgctgactctatcattattggtggagctaaacttaaagccttgaatttaggtgaaacatttgtcacgcactcaaagggattgtacagaaagtgtgttaaatccagagaagaaactggcctactcatgcctctaaaagccccaaaagaaattatcttcttagagggagaaacacttcccacagaagtgttaacagaggaagttgtcttgaaaactggtgatttacaaccattagaacaacctactagtgaagctgttgaagctccattggttggtacaccagtttgtattaacgggcttatgttgctcgaaatcaaagacacagaaaagtactgtgcccttgcacctaatatgatggtaacaaacaataccttcacactcaaaggcggtgcaccaacaaaggttacttttggtgatgacactgtgatagaagtgcaaggttacaagagtgtgaatatcacttttgaacttgatgaaaggattgataaagtacttaatgagaagtgctctgcctatacagttgaactcggtacagaagtaaatgagttcgcctgtgttgtggcagatgctgtcataaaaactttgcaaccagtatctgaattacttacaccactgggcattgatttagatgagtggagtatggctacatactacttatttgatgagtctggtgagtttaaattggcttcacatatgtattgttctttttaccctccagatgaggatgaagaagaaggtgattgtgaagaagaagagtttgagccatcaactcaatatgagtatggtactgaagatgattaccaaggtaaacctttggaatttggtgccacttctgctgctcttcaacctgaagaagagcaagaagaagattggttagatgatgatagtcaacaaactgttggtcaacaagacggcagtgaggacaatcagacaactattattcaaacaattgttgaggttcaacctcaattagagatggaacttacaccagttgttcagactattgaagtgaatagttttagtggttatttaaaacttactgacaatgtatacattaaaaatgcagacattgtggaagaagctaaaaaggtaaaaccaacagtggttgttaatgcagccaatgtttaccttaaacatggaggaggtgttgcaggagccttaaataaggctactaacaatgccatgcaagttgaatctgatgattacatagctactaatggaccacttaaagtgggtggtagttgtgttttaagcggacacaatcttgctaaacactgtcttcatgttgtcggcccaaatgttaacaaaggtgaagacattcaacttcttaagagtgcttatgaaaattttaatcagcacgaagttctacttgcaccattattatcagctggtatttttggtgctgaccctatacattctttaagagtttgtgtagatactgttcgcacaaatgtctacttagctgtctttgataaaaatctctatgacaaacttgtttcaagctttttggaaatgaagagtgaaaagcaagttgaacaaaagatcgctgagattcctaaagaggaagttaagccatttataactgaaagtaaaccttcagttgaacagagaaaacaagatgataagaaaatcaaagcttgtgttgaagaagttacaacaactctggaagaaactaagttcctcacagaaaacttgttactttatattgacattaatggcaatcttcatccagattctgccactcttgttagtgacattgacatcactttcttaaagaaagatgctccatatatagtgggtgatgttgttcaagagggtgttttaactgctgtggttatacctactaaaaaggctggtggcactactgaaatgctagcgaaagctttgagaaaagtgccaacagacaattatataaccacttacccgggtcagggtttaaatggttacactgtagaggaggcaaagacagtgcttaaaaagtgtaaaagtgccttttacattctaccatctattatctctaatgagaagcaagaaattcttggaactgtttcttggaatttgcgagaaatgcttgcacatgcagaagaaacacgcaaattaatgcctgtctgtgtggaaactaaagccatagtttcaactatacagcgtaaatataagggtattaaaatacaagagggtgtggttgattatggtgctagattttacttttacaccagtaaaacaactgtagcgtcacttatcaacacacttaacgatctaaatgaaactcttgttacaatgccacttggctatgtaacacatggcttaaatttggaagaagctgctcggtatatgagatctctcaaagtgccagctacagtttctgtttcttcacctgatgctgttacagcgtataatggttatcttacttcttcttctaaaacacctgaagaacattttattgaaaccatctcacttgctggttcctataaagattggtcctattctggacaatctacacaactaggtatagaatttcttaagagaggtgataaaagtgtatattacactagtaatcctaccacattccacctagatggtgaagttatcacctttgacaatcttaagacacttctttctttgagagaagtgaggactattaaggtgtttacaacagtagacaacattaacctccacacgcaagttgtggacatgtcaatgacatatggacaacagtttggtccaacttatttggatggagctgatgttactaaaataaaacctcataattcacatgaaggtaaaacattttatgttttacctaatgatgacactctacgtgttgaggcttttgagtactaccacacaactgatcctagttttctgggtaggtacatgtcagcattaaatcacactaaaaagtggaaatacccacaagttaatggtttaacttctataaaatgggcagataacaactgttatcttgccactgcattgttaacactccaacaaatagagttgaagtttaatccacctgctctacaagatgcttattacagagcaagggctggtgaagctgataacttttgtgcacttatcttagcctactgtaataagacagtaggtgagttaggtgatgttagagaaacaatgagttacttgtttcaacatgccaatttagattcttgcaaaagagtcttgaacgtggtgtgtaaaacttgtggacaacagcagacaacccttaagggtgtagaagctgttatgtacatgggcacactttcttatgaacaatttaagaaaggtgttcagataccttgtacgtgtggtaaacaagctacaaaatatctagtacaacaggagtcaccttttgttatgatgtcagcaccacctgctcagtatgaacttaagcatggtacatttacttgtgctagtgagtacactggtaattaccagtgtggtcactataaacatataacttctaaagaaactttgtattgcatagacggtgctttacttacaaagtcctcagaatacaaaggtcctattacggatgttttctacaaagaaaacagttacacaacaaccataaaaccagttacttataaattggatggtgttgtttgtacagaaattgaccctaagttggacaattattataagaaagacaattcttattttacagagcaaccaattgatcttgtaccaaaccaaccatatccaaacgcaagcttcgataattttaagtttgtatgtgataatatcaaatttgctgatgatttaaaccagttaactggttataagaaacctgcttcaagagagcttaaagttacatttttccctgacttaaatggtgatgtggtggctattgattataaacactacacaccctcttttaagaaaggagctaaattgttacataaacctattgtttggcatgttaacaatgcaactaataaagccacgtataaaccaaatacctggtgtatacgttgtctttggagcacaaaaccagttgaaacatcaaattcgtttgatgtactgaagtcagaggacgcgcagggaatggataatcttgcctgcgaagatctaaaaccagtctctgaagaagtagtggaaaatcctaccatacagaaagacgttcttgagtgtaatgtgaaaactaccgaagttgtaggagacattatacttaaaccagcaaataatagtttaaaaattacagaagaggttggccacacagatctaatggctgcttatgtagacaattctagtcttactattaagaaacctaatgaattatctagagtattaggtttgaaaacccttgctactcatggtttagctgctgttaatagtgtcccttgggatactatagctaattatgctaagccttttcttaacaaagttgttagtacaactactaacatagttacacggtgtttaaaccgtgtttgtactaattatatgccttatttctttactttattgctacaattgtgtacttttactagaagtacaaattctagaattaaagcatctatgccgactactatagcaaagaatactgttaagagtgtcggtaaattttgtctagaggcttcatttaattatttgaagtcacctaatttttctaaactgataaatattacaatttggtttttactattaagtgtttgcctaggttctttaatctactcaaccgctgctttaggtgttttaatgtctaatttaggcatgccttcttactgtactggttacagagaaggctatttgaactctactaatgtcactattgcaacctactgtactggttctataccttgtagtgtttgtcttagtggtttagattctttagacacctatccttctttagaaactatacaaattaccatttcatcttttaaatgggatttaactgcttttggcttagttgcagagtggtttttggcatatattcttttcactaggtttttctatgtacttggattggctgcaatcatgcaattgtttttcagctattttgcagtacattttattagtaattcttggcttatgtggttaataattaatcttgtacaaatggccccgatttcagctatggttagaatgtacatcttctttgcatcattttattatgtatggaaaagttatgtgcatgttgtagacggttgtaattcatcaacttgtatgatgtgttacaaacgtaatagagcaacaagagtcgaatgtacaactattgttaatggtgttagaaggtccttttatgtctatgctaatggaggtaaaggcttttgcaaactacacaattggaattgtgttaattgtgatacattctgtgctggtagtacatttattagtgatgaagttgcgagagacttgtcactacagtttaaaagaccaataaatcctactgaccagtcttcttacatcgttgatagtgttacagtgaagaatggttccatccatctttactttgataaagctggtcaaaagacttatgaaagacattctctctctcattttgttaacttagacaacctgagagctaataacactaaaggttcattgcctattaatgttatagtttttgatggtaaatcaaaatgtgaagaatcatctgcaaaatcagcgtctgtttactacagtcagcttatgtgtcaacctatactgttactagatcaggcattagtgtctgatgttggtgatagtgcggaagttgcagttaaaatgtttgatgcttacgttaatacgttttcatcaacttttaacgtaccaatggaaaaactcaaaacactagttgcaactgcagaagctgaacttgcaaagaatgtgtccttagacaatgtcttatctacttttatttcagcagctcggcaagggtttgttgattcagatgtagaaactaaagatgttgttgaatgtcttaaattgtcacatcaatctgacatagaagttactggcgatagttgtaataactatatgctcacctataacaaagttgaaaacatgacaccccgtgaccttggtgcttgtattgactgtagtgcgcgtcatattaatgcgcaggtagcaaaaagtcacaacattgctttgatatggaacgttaaagatttcatgtcattgtctgaacaactacgaaaacaaatacgtagtgctgctaaaaagaataacttaccttttaagttgacatgtgcaactactagacaagttgttaatgttgtaacaacaaagatagcacttaagggtggtaaaattgttaataattggttgaagcagttaattaaagttacacttgtgttcctttttgttgctgctattttctatttaataacacctgttcatgtcatgtctaaacatactgacttttcaagtgaaatcataggatacaaggctattgatggtggtgtcactcgtgacatagcatctacagatacttgttttgctaacaaacatgctgattttgacacatggtttagccagcgtggtggtagttatactaatgacaaagcttgcccattgattgctgcagtcataacaagagaagtgggttttgtcgtgcctggtttgcctggcacgatattacgcacaactaatggtgactttttgcatttcttacctagagtttttagtgcagttggtaacatctgttacacaccatcaaaacttatagagtacactgactttgcaacatcagcttgtgttttggctgctgaatgtacaatttttaaagatgcttctggtaagccagtaccatattgttatgataccaatgtactagaaggttctgttgcttatgaaagtttacgccctgacacacgttatgtgctcatggatggctctattattcaatttcctaacacctaccttgaaggttctgttagagtggtaacaacttttgattctgagtactgtaggcacggcacttgtgaaagatcagaagctggtgtttgtgtatctactagtggtagatgggtacttaacaatgattattacagatctttaccaggagttttctgtggtgtagatgctgtaaatttacttactaatatgtttacaccactaattcaacctattggtgctttggacatatcagcatctatagtagctggtggtattgtagctatcgtagtaacatgccttgcctactattttatgaggtttagaagagcttttggtgaatacagtcatgtagttgcctttaatactttactattccttatgtcattcactgtactctgtttaacaccagtttactcattcttacctggtgtttattctgttatttacttgtacttgacattttatcttactaatgatgtttcttttttagcacatattcagtggatggttatgttcacacctttagtacctttctggataacaattgcttatatcatttgtatttccacaaagcatttctattggttctttagtaattacctaaagagacgtgtagtctttaatggtgtttcctttagtacttttgaagaagctgcgctgtgcacctttttgttaaataaagaaatgtatctaaagttgcgtagtgatgtgctattacctcttacgcaatataatagatacttagctctttataataagtacaagtattttagtggagcaatggatacaactagctacagagaagctgcttgttgtcatctcgcaaaggctctcaatgacttcagtaactcaggttctgatgttctttaccaaccaccacaaacctctatcacctcagctgttttgcagagtggttttagaaaaatggcattcccatctggtaaagttgagggttgtatggtacaagtaacttgtggtacaactacacttaacggtctttggcttgatgacgtagtttactgtccaagacatgtgatctgcacctctgaagacatgcttaaccctaattatgaagatttactcattcgtaagtctaatcataatttcttggtacaggctggtaatgttcaactcagggttattggacattctatgcaaaattgtgtacttaagcttaaggttgatacagccaatcctaagacacctaagtataagtttgttcgcattcaaccaggacagactttttcagtgttagcttgttacaatggttcaccatctggtgtttaccaatgtgctatgaggcccaatttcactattaagggttcattccttaatggttcatgtggtagtgttggttttaacatagattatgactgtgtctctttttgttacatgcaccatatggaattaccaactggagttcatgctggcacagacttagaaggtaacttttatggaccttttgttgacaggcaaacagcacaagcagctggtacggacacaactattacagttaatgttttagcttggttgtacgctgctgttataaatggagacaggtggtttctcaatcgatttaccacaactcttaatgactttaaccttgtggctatgaagtacaattatgaacctctaacacaagaccatgttgacatactaggacctctttctgctcaaactggaattgccgttttagatatgtgtgcttcattaaaagaattactgcaaaatggtatgaatggacgtaccatattgggtagtgctttattagaagatgaatttacaccttttgatgttgttagacaatgctcaggtgttactttccaaagtgcagtgaaaagaacaatcaagggtacacaccactggttgttactcacaattttgacttcacttttagttttagtccagagtactcaatggtctttgttcttttttttgtatgaaaatgcctttttaccttttgctatgggtattattgctatgtctgcttttgcaatgatgtttgtcaaacataagcatgcatttctctgtttgtttttgttaccttctcttgccactgtagcttattttaatatggtctatatgcctgctagttgggtgatgcgtattatgacatggttggatatggttgatactagtttgaagctaaaagactgtgttatgtatgcatcagctgtagtgttactaatccttatgacagcaagaactgtgtatgatgatggtgctaggagagtgtggacacttatgaatgtcttgacactcgtttataaagtttattatggtaatgctttagatcaagccatttccatgtgggctcttataatctctgttacttctaactactcaggtgtagttacaactgtcatgtttttggccagaggtattgtttttatgtgtgttgagtattgccctattttcttcataactggtaatacacttcagtgtataatgctagtttattgtttcttaggctatttttgtacttgttactttggcctcttttgtttactcaaccgctactttagactgactcttggtgtttatgattacttagtttctacacaggagtttagatatatgaattcacagggactactcccacccaagaatagcatagatgccttcaaactcaacattaaattgttgggtgttggtggcaaaccttgtatcaaagtagccactgtacagtctaaaatgtcagatgtaaagtgcacatcagtagtcttactctcagttttgcaacaactcagagtagaatcatcatctaaattgtgggctcaatgtgtccagttacacaatgacattctcttagctaaagatactactgaagcctttgaaaaaatggtttcactactttctgttttgctttccatgcagggtgctgtagacataaacaagctttgtgaagaaatgctggacaacagggcaaccttacaagctatagcctcagagtttagttcccttccatcatatgcagcttttgctactgctcaagaagcttatgagcaggctgttgctaatggtgattctgaagttgttcttaaaaagttgaagaagtctttgaatgtggctaaatctgaatttgaccgtgatgcagccatgcaacgtaagttggaaaagatggctgatcaagctatgacccaaatgtataaacaggctagatctgaggacaagagggcaaaagttactagtgctatgcagacaatgcttttcactatgcttagaaagttggataatgatgcactcaacaacattatcaacaatgcaagagatggttgtgttcccttgaacataatacctcttacaacagcagccaaactaatggttgtcataccagactataacacatataaaaatacgtgtgatggtacaacatttacttatgcatcagcattgtgggaaatccaacaggttgtagatgcagatagtaaaattgttcaacttagtgaaattagtatggacaattcacctaatttagcatggcctcttattgtaacagctttaagggccaattctgctgtcaaattacagaataatgagcttagtcctgttgcactacgacagatgtcttgtgctgccggtactacacaaactgcttgcactgatgacaatgcgttagcttactacaacacaacaaagggaggtaggtttgtacttgcactgttatccgatttacaggatttgaaatgggctagattccctaagagtgatggaactggtactatctatacagaactggaaccaccttgtaggtttgttacagacacacctaaaggtcctaaagtgaagtatttatactttattaaaggattaaacaacctaaatagaggtatggtacttggtagtttagctgccacagtacgtctacaagctggtaatgcaacagaagtgcctgccaattcaactgtattatctttctgtgcttttgctgtagatgctgctaaagcttacaaagattatctagctagtgggggacaaccaatcactaattgtgttaagatgttgtgtacacacactggtactggtcaggcaataacagttacaccggaagccaatatggatcaagaatcctttggtggtgcatcgtgttgtctgtactgccgttgccacatagatcatccaaatcctaaaggattttgtgacttaaaaggtaagtatgtacaaatacctacaacttgtgctaatgaccctgtgggttttacacttaaaaacacagtctgtaccgtctgcggtatgtggaaaggttatggctgtagttgtgatcaactccgcgaacccatgcttcagtcagctgatgcacaatcgtttttaaaccgggtttgcggtgtaagtgcagcccgtcttacaccgtgcggcacaggcactagtactgatgtcgtatacagggcttttgacatctacaatgataaagtagctggttttgctaaattcctaaaaactaattgttgtcgcttccaagaaaaggacgaagatgacaatttaattgattcttactttgtagttaagagacacactttctctaactaccaacatgaagaaacaatttataatttacttaaggattgtccagctgttgctaaacatgacttctttaagtttagaatagacggtgacatggtaccacatatatcacgtcaacgtcttactaaatacacaatggcagacctcgtctatgctttaaggcattttgatgaaggtaattgtgacacattaaaagaaatacttgtcacatacaattgttgtgatgatgattatttcaataaaaaggactggtatgattttgtagaaaacccagatatattacgcgtatacgccaacttaggtgaacgtgtacgccaagctttgttaaaaacagtacaattctgtgatgccatgcgaaatgctggtattgttggtgtactgacattagataatcaagatctcaatggtaactggtatgatttcggtgatttcatacaaaccacgccaggtagtggagttcctgttgtagattcttattattcattgttaatgcctatattaaccttgaccagggctttaactgcagagtcacatgttgacactgacttaacaaagccttacattaagtgggatttgttaaaatatgacttcacggaagagaggttaaaactctttgaccgttattttaaatattgggatcagacataccacccaaattgtgttaactgtttggatgacagatgcattctgcattgtgcaaactttaatgttttattctctacagtgttcccacttacaagttttggaccactagtgagaaaaatatttgttgatggtgttccatttgtagtttcaactggataccacttcagagagctaggtgttgtacataatcaggatgtaaacttacatagctctagacttagttttaaggaattacttgtgtatgctgctgaccctgctatgcacgctgcttctggtaatctattactagataaacgcactacgtgcttttcagtagctgcacttactaacaatgttgcttttcaaactgtcaaacctggtaattttaacaaagacttctatgactttgctgtgtctaagggtttctttaaggaaggaagttctgttgaattaaaacacttcttctttgctcaggatggtaatgctgctatcagcgattatgactactatcgttataatctaccaacaatgtgtgatatcagacaactactatttgtagttgaagttgttgataagtactttgattgttacgatggtggctgtattaatgctaaccaagtcatcgtcaacaacctagacaaatcagctggttttccatttaataaatggggtaaggctagactttattatgattcaatgagttatgaggatcaagatgcacttttcgcatatacaaaacgtaatgtcatccctactataactcaaatgaatcttaagtatgccattagtgcaaagaatagagctcgcaccgtagctggtgtctctatctgtagtactatgaccaatagacagtttcatcaaaaattattgaaatcaatagccgccactagaggagctactgtagtaattggaacaagcaaattctatggtggttggcacaacatgttaaaaactgtttatagtgatgtagaaaaccctcatcttatgggttgggattatcctaaatgtgatagagccatgcctaacatgcttagaattatggcctcacttgttcttgctcgcaaacatacaacgtgttgtagcttgtcacaccgtttctatagattagctaatgagtgtgctcaagtattgagtgaaatggtcatgtgtggcggttcactatatgttaaaccaggtggaacctcatcaggagatgccacaactgcttatgctaatagtgtttttaacatttgtcaagctgtcacggccaatgttaatgcacttttatctactgatggtaacaaaattgccgataagtatgtccgcaatttacaacacagactttatgagtgtctctatagaaatagagatgttgacacagactttgtgaatgagttttacgcatatttgcgtaaacatttctcaatgatgatactctctgacgatgctgttgtgtgtttcaatagcacttatgcatctcaaggtctagtggctagcataaagaactttaagtcagttctttattatcaaaacaatgtttttatgtctgaagcaaaatgttggactgagactgaccttactaaaggacctcatgaattttgctctcaacatacaatgctagttaaacagggtgatgattatgtgtaccttccttacccagatccatcaagaatcctaggggccggctgttttgtagatgatatcgtaaaaacagatggtacacttatgattgaacggttcgtgtctttagctatagatgcttacccacttactaaacatcctaatcaggagtatgctgatgtctttcatttgtacttacaatacataagaaagctacatgatgagttaacaggacacatgttagacatgtattctgttatgcttactaatgataacacctcaaggtattgggaacctgagttttatgaggctatgtacacaccgcatacagtcttacaggctgttggggcttgtgttctttgcaattcacagacttcattaagatgtggtgcttgcatacgtagaccattcttatgttgtaaatgctgttacgaccatgtcatatcaacatcacataaattagtcttgtctgttaatccgtatgtttgcaatgctccaggttgtgatgtcacagatgtgactcaactttacttaggaggtatgagctattattgtaaatcacataaaccatccattagttttccattgtgtgctaatggacaagtttttggtttatataaaaatacatgtgttggtagcgataatgttactgactttaatgcaattgcaacatgtgactggacaaatgctggtgattacattttagctaacacctgtactgaaagactcaagctttttgcagcagaaacgctcaaagctactgaggagacatttaaactgtcttatggtattgctactgtacgtgaagtgctgtctgacagagaattacatctttcatgggaagttggtaaacctagaccaccacttaaccgaaattatgtctttactggttatcgtgtaactaaaaacagtaaagtacaaataggagagtacacctttgaaaaaggtgactatggtgatgctgttgtttaccgaggtacaacaacttacaaattaaatgttggtgattattttgtgctgacatcacatacagtaatgccattaagtgcacctacactagtgccacaagagcactatgttagaattactggcttatacccaacactcaatatctcagatgagttttctagcaatgttgcaaattatcaaaaggttggtatgcaaaagtattctacactccagggaccacctggtactggtaagagtcattttgctattggcctagctctctactacccttctgctcgcatagtgtatacagcttgctctcatgccgctgttgatgcactatgtgagaaggcattaaaatatttgcctatagataaatgtagtagaattatacctgcacgtgctcgtgtagagtgttttgataaattcaaagtgaattcaacattagaacagtatgtcttttgtactgtaaatgcattgcctgagacgacagcagatatagttgtctttgatgaaatttcaatggccacaaattatgatttgagtgttgtcaatgccagattacgtgctaagcactatgtgtacattggcgaccctgctcaattacctgcaccacgcacattgctaactaagggcacactagaaccagaatatttcaattcagtgtgtagacttatgaaaactataggtccagacatgttcctcggaacttgtcggcgttgtcctgctgaaattgttgacactgtgagtgctttggtttatgataataggcttaaagcacataaagacaaatcagctcaatgctttaaaatgttttataagggtgttatcacgcatgatgtttcatctgcaattaacaggccacaaataggcgtggtaagagaattccttacacgtaaccctgcttggagaaaagctgtctttatttcaccttataattcacagaatgctgtagcctcaaagattttgggactaccaactcaaactgttgattcatcacagggctcagaatatgactatgtcatattcactcaaaccactgaaacagctcactcttgtaatgtaaacagatttaatgttgctattaccagagcaaaagtaggcatactttgcataatgtctgatagagacctttatgacaagttgcaatttacaagtcttgaaattccacgtaggaatgtggcaactttacaagctgaaaatgtaacaggactctttaaagattgtagtaaggtaatcactgggttacatcctacacaggcacctacacacctcagtgttgacactaaattcaaaactgaaggtttatgtgttgacatacctggcatacctaaggacatgacctatagaagactcatctctatgatgggttttaaaatgaattatcaagttaatggttaccctaacatgtttatcacccgcgaagaagctataagacatgtacgtgcatggattggcttcgatgtcgaggggtgtcatgctactagagaagctgttggtaccaatttacctttacagctaggtttttctacaggtgttaacctagttgctgtacctacaggttatgttgatacacctaataatacagatttttccagagttagtgctaaaccaccgcctggagatcaatttaaacacctcataccacttatgtacaaaggacttccttggaatgtagtgcgtataaagattgtacaaatgttaagtgacacacttaaaaatctctctgacagagtcgtatttgtcttatgggcacatggctttgagttgacatctatgaagtattttgtgaaaataggacctgagcgcacctgttgtctatgtgatagacgtgccacatgcttttccactgcttcagacacttatgcctgttggcatcattctattggatttgattacgtctataatccgtttatgattgatgttcaacaatggggttttacaggtaacctacaaagcaaccatgatctgtattgtcaagtccatggtaatgcacatgtagctagttgtgatgcaatcatgactaggtgtctagctgtccacgagtgctttgttaagcgtgttgactggactattgaatatcctataattggtgatgaactgaagattaatgcggcttgtagaaaggttcaacacatggttgttaaagctgcattattagcagacaaattcccagttcttcacgacattggtaaccctaaagctattaagtgtgtacctcaagctgatgtagaatggaagttctatgatgcacagccttgtagtgacaaagcttataaaatagaagaattattctattcttatgccacacattctgacaaattcacagatggtgtatgcctattttggaattgcaatgtcgatagatatcctgctaattccattgtttgtagatttgacactagagtgctatctaaccttaacttgcctggttgtgatggtggcagtttgtatgtaaataaacatgcattccacacaccagcttttgataaaagtgcttttgttaatttaaaacaattaccatttttctattactctgacagtccatgtgagtctcatggaaaacaagtagtgtcagatatagattatgtaccactaaagtctgctacgtgtataacacgttgcaatttaggtggtgctgtctgtagacatcatgctaatgagtacagattgtatctcgatgcttataacatgatgatctcagctggctttagcttgtgggtttacaaacaatttgatacttataacctctggaacacttttacaagacttcagagtttagaaaatgtggcttttaatgttgtaaataagggacactttgatggacaacagggtgaagtaccagtttctatcattaataacactgtttacacaaaagttgatggtgttgatgtagaattgtttgaaaataaaacaacattacctgttaatgtagcatttgagctttgggctaagcgcaacattaaaccagtaccagaggtgaaaatactcaataatttgggtgtggacattgctgctaatactgtgatctgggactacaaaagagatgctccagcacatatatctactattggtgtttgttctatgactgacatagccaagaaaccaactgaaacgatttgtgcaccactcactgtcttttttgatggtagagttgatggtcaagtagacttatttagaaatgcccgtaatggtgttcttattacagaaggtagtgttaaaggtttacaaccatctgtaggtcccaaacaagctagtcttaatggagtcacattaattggagaagccgtaaaaacacagttcaattattataagaaagttgatggtgttgtccaacaattacctgaaacttactttactcagagtagaaatttacaagaatttaaacccaggagtcaaatggaaattgatttcttagaattagctatggatgaattcattgaacggtataaattagaaggctatgccttcgaacatatcgtttatggagattttagtcatagtcagttaggtggtttacatctactgattggactagctaaacgttttaaggaatcaccttttgaattagaagattttattcctatggacagtacagttaaaaactatttcataacagatgcgcaaacaggttcatctaagtgtgtgtgttctgttattgatttattacttgatgattttgttgaaataataaaatcccaagatttatctgtagtttctaaggttgtcaaagtgactattgactatacagaaatttcatttatgctttggtgtaaagatggccatgtagaaacattttacccaaaattacaatctagtcaagcgtggcaaccgggtgttgctatgcctaatctttacaaaatgcaaagaatgctattagaaaagtgtgaccttcaaaattatggtgatagtgcaacattacctaaaggcataatgatgaatgtcgcaaaatatactcaactgtgtcaatatttaaacacattaacattagctgtaccctataatatgagagttatacattttggtgctggttctgataaaggagttgcaccaggtacagctgttttaagacagtggttgcctacgggtacgctgcttgtcgattcagatcttaatgactttgtctctgatgcagattcaactttgattggtgattgtgcaactgtacatacagctaataaatgggatctcattattagtgatatgtacgaccctaagactaaaaatgttacaaaagaaaatgactctaaagagggttttttcacttacatttgtgggtttatacaacaaaagctagctcttggaggttccgtggctataaagataacagaacattcttggaatgctgatctttataagctcatgggacacttcgcatggtggacagcctttgttactaatgtgaatgcgtcatcatctgaagcatttttaattggatgtaattatcttggcaaaccacgcgaacaaatagatggttatgtcatgcatgcaaattacatattttggaggaatacaaatccaattcagttgtcttcctattctttatttgacatgagtaaatttccccttaaattaaggggtactgctgttatgtctttaaaagaaggtcaaatcaatgatatgattttatctcttcttagtaaaggtagacttataattagagaaaacaacagagttgttatttctagtgatgttcttgttaacaactaa

SEQ ID NO: 44 - protein, 7093 aa, Severe acute respiratory syndrome coronavirus 2
MESLVPGFNEKTHVQLSLPVLQVRDVLVRGFGDSVEEVLSEARQHLKDGTCGLVEVEKGVLPQLEQPYVFIKRSDARTAPHGHVMVELVAELEGIQYGRSGETLGVLVPHVGEIPVAYRKVLLRKNGNKGAGGHSYGADLKSFDLGDELGTDPYEDFQENWNTKHSSGVTRELMRELNGGAYTRYVDNNFCGPDGYPLECIKDLLARAGKASCTLSEQLDFIDTKRGVYCCREHEHEIAWYTERSEKSYELQTPFEIKLAKKFDTFNGECPNFVFPLNSIIKTIQPRVEKKKLDGFMGRIRSVYPVASPNECNQMCLSTLMKCDHCGETSWQTGDFVKATCEFCGTENLTKEGATTCGYLPQNAVVKIYCPACHNSEVGPEHSLAEYHNESGLKTILRKGGRTIAFGGCVFSYVGCHNKCAYWVPRASANIGCNHTGVVGEGSEGLNDNLLEILQKEKVNINIVGDFKLNEEIAIILASFSASTSAFVETVKGLDYKAFKQIVESCGNFKVTKGKAKKGAWNIGEQKSILSPLYAFASEAARVVRSIFSRTLETAQNSVRVLQKAAITILDGISQYSLRLIDAMMFTSDLATNNLVVMAYITGGVVQLTSQWLTNIFGTVYEKLKPVLDWLEEKFKEGVEFLRDGWEIVKFISTCACEIVGGQIVTCAKEIKESVQTFFKLVNKFLALCADSIIIGGAKLKALNLGETFVTHSKGLYRKCVKSREETGLLMPLKAPKEIIFLEGETLPTEVLTEEVVLKTGDLQPLEQPTSEAVEAPLVGTPVCINGLMLLEIKDTEKYCALAPNMMVTNNTFTLKGGAPTKVTFGDDTVIEVQGYKSVNITFELDERIDKVLNEKCSAYTVELGTEVNEFACVVADAVIKTLQPVSELLTPLGIDLDEWSMATYYLFDESGEFKLASHMYCSFYPPDEDEEEGDCEEEEFEPSTQYEYGTEDDYQGKPLEFGATSAALQPEEEQEEDWLDDDSQQTVGQQDGSEDNQTTIIQTIVEVQPQLEMELTPVVQTIEVNSFSGYLKLTDNVYIKNADIVEEAKKVKPTVVVNAANVYLKHGGGVAGALNKATNNAMQVESDDYIATNGPLKVGGSCVLSGHNLAKHCLHVVGPNVNKGEDIQLLKSAYENFNQHEVLLAPLLSAGIFGADPIHSLRVCVDTVRTNVYLAVFDKNLYDKLVSSFLEMKSEKQVEQKIAEIPKEEVKPFITESKPSVEQRKQDDKKIKACVEEVTTTLEETKFLTENLLLYIDINGNLHPDSATLVSDIDITFLKKDAPYIVGDVVQEGVLTAVVIPTKKAGGTTEMLAKALRKVPTDNYITTYPGQGLNGYTVEEAKTVLKKCKSAFYILPSIISNEKQEILGTVSWNLREMLAHAEETRKLMPVCVETKAIVSTIQRKYKGIKIQEGVVDYGARFYFYTSKTTVASLINTLNDLNETLVTMPLGYVTHGLNLEEAARYMRSLKVPATVSVSSPDAVTAYNGYLTSSSKTPEEHFIETISLAGSYKDWSYSGQSTQLGIEFLKRGDKSVYYTSNPTTFHLDGEVITFDNLKTLLSLREVRTIKVFTTVDNINLHTQVVDMSMTYGQQFGPTYLDGADVTKIKPHNSHEGKTFYVLPNDDTLRVEAFEYYHTTDPSFLGRYMSALNHTKKWKYPQVNGLTSIKWADNNCYLATALLTLQQIELKFNPPALQDAYYRARAGEADNFCALILAYCNKTVGELGDVRETMSYLFQHANLDSCKRVLNVVCKTCGQQQTTLKGVEAVMYMGTLSYEQFKKGVQIPCTCGKQATKYLVQQESPFVMMSAPPAQYELKHGTFTCASEYTGNYQCGHYKHITSKETLYCIDGALLTKSSEYKGPITDVFYKENSYTTTIKPVTYKLDGVVCTEIDPKLDNYYKKDNSYFTEQPIDLVPNQPYPNASFDNFKFVCDNIKFADDLNQLTGYKKPASRELKVTFFPDLNGDVVAIDYKHYTPSFKKGAKLLHKPIVWHVNNATNKATYKPNTWCIRCLWSTKPVETSNSFDVLKSEDAQGMDNLACEDLKPVSEEVVENPTIQKDVLECNVKTTEVVGDIILKPANNSLKITEEVGHTDLMAAYVDNSSLTIKKPNELSRVLGLKTLATHGLAAVNSVPWDTIANYAKPFLNKVVSTTTNIVTRCLNRVCTNYMPYFFTLLLQLCTFTRSTNSRIKASMPTTIAKNTVKSVGKFCLEASFNYLKSPNFSKLINITIWFLLLSVCLGSLIYSTAALGVLMSNLGMPSYCTGYREGYLNSTNVTIATYCTGSIPCSVCLSGLDSLDTYPSLETIQITISSFKWDLTAFGLVAEWFLAYILFTRFFYVLGLAAIMQLFFSYFAVHFISNSWLMWLIINLVQMAPISAMVRMYIFFASFYYVWKSYVHVVDGCNSSTCMMCYKRNRATRVECTTIVNGVRRSFYVYANGGKGFCKLHNWNCVNCDTFCAGSTFISDEVARDLSLQFKRPINPTDQSSYIVDSVTVKNGSIHLYFDKAGQKTYERHSLSHFVNLDNLRANNTKGSLPINVIVFDGKSKCEESSAKSASVYYSQLMCQPILLLDQALVSDVGDSAEVAVKMFDAYVNTFSSTFNVPMEKLKTLVATAEAELAKNVSLDNVLSTFISAARQGFVDSDVETKDVVECLKLSHQSDIEVTGDSCNNYMLTYNKVENMTPRDLGACIDCSARHINAQVAKSHNIALIWNVKDFMSLSEQLRKQIRSAAKKNNLPFKLTCATTRQVVNVVTTKIALKGGKIVNNWLKQLIKVTLVFLFVAAIFYLITPVHVMSKHTDFSSEIIGYKAIDGGVTRDIASTDTCFANKHADFDTWFSQRGGSYTNDKACPLIAAVITREVGFVVPGLPGTILRTTNGDFLHFLPRVFSAVGNICYTPSKLIEYTDFATSACVLAAECTIFKDASGKPVPYCYDTNVLEGSVAYESLRPDTRYVLMDGSIIQFPNTYLEGSVRVVTTFDSEYCRHGTCERSEAGVCVSTSGRWVLNNDYYRSLPGVFCGVDAVNLLTNMFTPLIQPIGALDISASIVAGGIVAIVVTCLAYYFMRFRRAFGEYSHVVAFNTLLFLMSFTVLCLTPVYSFLPGVYSVIYLYLTFYLTNDVSFLAHIQWMVMFTPLVPFWITIAYIICISTKHFYWFFSNYLKRRVVFNGVSFSTFEEAALCTFLLNKEMYLKLRSDVLLPLTQYNRYLALYNKYKYFSGAMDTTSYREAACCHLAKALNDFSNSGSDVLYQPPQTSITSAVLQSGFRKMAFPSGKVEGCMVQVTCGTTTLNGLWLDDVVYCPRHVICTSEDMLNPNYEDLLIRKSNHNFLVQAGNVQLRVIGHSMQNCVLKLKVDTANPKTPKYKFVRIQPGQTFSVLACYNGSPSGVYQCAMRPNFTIKGSFLNGSCGSVGFNIDYDCVSFCYMHHMELPTGVHAGTDLEGNFYGPFVDRQTAQAAGTDTTITVNVLAWLYAAVINGDRWFLNRFTTTLNDFNLVAMKYNYEPLTQDHVDILGPLSAQTGIAVLDMCASLKELLQNGMNGRTILGSALLEDEFTPFDVVRQCSGVTFQSAVKRTIKGTHHWLLLTILTSLLVLVQSTQWSLFFFLYENAFLPFAMGIIAMSAFAMMFVKHKHAFLCLFLLPSLATVAYFNMVYMPASWVMRIMTWLDMVDTSLKLKDCVMYASAVVLLILMTARTVYDDGARRVWTLMNVLTLVYKVYYGNALDQAISMWALIISVTSNYSGVVTTVMFLARGIVFMCVEYCPIFFITGNTLQCIMLVYCFLGYFCTCYFGLFCLLNRYFRLTLGVYDYLVSTQEFRYMNSQGLLPPKNSIDAFKLNIKLLGVGGKPCIKVATVQSKMSDVKCTSVVLLSVLQQLRVESSSKLWAQCVQLHNDILLAKDTTEAFEKMVSLLSVLLSMQGAVDINKLCEEMLDNRATLQAIASEFSSLPSYAAFATAQEAYEQAVANGDSEVVLKKLKKSLNVAKSEFDRDAAMQRKLEKMADQAMTQMYKQARSEDKRAKVTSAMQTMLFTMLRKLDNDALNNIINNARDGCVPLNIIPLTTAAKLMVVIPDYNTYKNTCDGTTFTYASALWEIQQVVDADSKIVQLSEISMDNSPNLAWPLIVTALRANSAVKLQNNELSPVALRQMSCAAGTTQTACTDDNALAYYNTTKGGRFVLALLSDLQDLKWARFPKSDGTGTIYTELEPPCRFVTDTPKGPKVKYLYFIKGLNNLNRGMVLGSLAATVRLQAGNATEVPANSTVLSFCAFAVDAAKAYKDYLASGGQPITNCVKMLCTHTGTGQAITVTPEANMDQESFGGASCCLYCRCHIDHPNPKGFCDLKGKYVQIPTTCANDPVGFTLKNTVCTVCGMWKGYGCSCDQLREPMLQSADAQSFLNRVCGVSAARLTPCGTGTSTDVVYRAFDIYNDKVAGFAKFLKTNCCRFQEKDEDDNLIDSYFVVKRHTFSNYQHEETIYNLLKDCPAVAKHDFFKFRIDGDMVPHISRQRLTKYTMADLVYALRHFDEGNCDTLKEILVTYNCCDDDYFNKKDWYDFVENPDILRVYANLGERVRQALLKTVQFCDAMRNAGIVGVLTLDNQDLNGNWYDFGDFIQTTPGSGVPVVDSYYSLLMPILTLTRALTAESHVDTDLTKPYIKWDLLKYDFTEERLKLFDRYFKYWDQTYHPNCVNCLDDRCILHCANFNVLFSTVFPLTSFGPLVRKIFVDGVPFVVSTGYHFRELGVVHNQDVNLHSSRLSFKELLVYAADPAMHAASGNLLLDKRTTCFSVAALTNNVAFQTVKPGNFNKDFYDFAVSKGFFKEGSSVELKHFFFAQDGNAAISDYDYYRYNLPTMCDIRQLLFVVEVVDKYFDCYDGGCINANQVIVNNLDKSAGFPFNKWGKARLYYDSMSYEDQDALFAYTKRNVIPTITQMNLKYAISAKNRARTVAGVSICSTMTNRQFHQKLLKSIAATRGATVVIGTSKFYGGWHNMLKTVYSDVENPHLMGWDYPKCDRAMPNMLRIMASLVLARKHTTCCSLSHRFYRLANECAQVLSEMVMCGGSLYVKPGGTSSGDATTAYANSVFNICQAVTANVNALLSTDGNKIADKYVRNLQHRLYECLYRNRDVDTDFVNEFYAYLRKHFSMMILSDDAVVCFNSTYASQGLVASIKNFKSVLYYQNNVFMSEAKCWTETDLTKGPHEFCSQHTMLVKQGDDYVYLPYPDPSRILGAGCFVDDIVKTDGTLMIERFVSLAIDAYPLTKHPNQEYADVFHLYLQYIRKLHDELTGHMLDMYSVMLTNDNTSRYWEPEFYEAMYTPHTVLQAVGACVLCNSQTSLRCGACIRRPFLCCKCCYDHVISTSHKLVLSVNPYVCNAPGCDVTDVTQLYLGGMSYYCKSHKPSISFPLCANGQVFGLYKNTCVGSDNVTDFNAIATCDWTNAGDYILANTCTERLKLFAAETLKATEETFKLSYGIATVREVLSDRELHLSWEVGKPRPPLNRNYVFTGYRVTKNSKVQIGEYTFEKGDYGDAVVYRGTTTYKLNVGDYFVLTSHTVMPLSAPTLVPQEHYVRITGLYPTLNISDEFSSNVANYQKVGMQKYSTLQGPPGTGKSHFAIGLALYYPSARIVYTACSHAAVDALCEKALKYLPIDKCSRIIPARARVECFDKFKVNSTLEQYVFCTVNALPETTADIVVFDEISMATNYDLSVVNARLRAKHYVYIGDPAQLPAPRTLLTKGTLEPEYFNSVCRLMKTIGPDMFLGTCRRCPAEIVDTVSALVYDNRLKAHKDKSAQCFKMFYKGVITHDVSSAINRPQIGVVREFLTRNPAWRKAVFISPYNSQNAVASKILGLPTQTVDSSQGSEYDYVIFTQTTETAHSCNVNRFNVAITRAKVGILCIMSDRDLYDKLQFTSLEIPRRNVATLQAENVTGLFKDCSKVITGLHPTQAPTHLSVDTKFKTEGLCVDIPGIPKDMTYRRLISMMGFKMNYQVNGYPNMFITREEAIRHVRAWIGFDVEGCHATREAVGTNLPLQLGFSTGVNLVAVPTGYVDTPNNTDFSRVSAKPPPGDQFKHLIPLMYKGLPWNVVRIKIVQMLSDTLKNLSDRVVFVLWAHGFELTSMKYFVKIGPERTCCLCDRRATCFSTASDTYACWHHSIGFDYVYNPFMIDVQQWGFTGNLQSNHDLYCQVHGNAHVASCDAIMTRCLAVHECFVKRVDWTIEYPIIGDELKINAACRKVQHMVVKAALLADKFPVLHDIGNPKAIKCVPQADVEWKFYDAQPCSDKAYKIEELFYSYATHSDKFTDGVCLFWNCNVDRYPANSIVCRFDTRVLSNLNLPGCDGGSLYVNKHAFHTPAFDKSAFVNLKQLPFFYYSDSPCESHGKQVVSDIDYVPLKSATCITRCNLGGAVCRHHANEYRLYLDAYNMMISAGFSLWVYKQFDTYNLWNTFTRLQSLENVAFNVVNKGHFDGQQGEVPVSIINNTVYTKVDGVDVELFENKTTLPVNVAFELWAKRNIKPVPEVKILNNLGVDIAANTVIWDYKRDAPAHISTIGVCSMTDIAKKPTETICAPLTVFFDGRVDGQVDLFRNARNGVLITEGSVKGLQPSVGPKQASLNGVTLIGEAVKTQFNYYKKVDGVVQQLPETYFTQSRNLQEFKPRSQMEIDFLELAMDEFIERYKLEGYAFEHIVYGDFSHSQLGGLHLLIGLAKRFKESPFELEDFIPMDSTVKNYFITDAQTGSSKCVCSVIDLLLDDFVEIIKSQDLSVVSKVVKVTIDYTEISFMLWCKDGHVETFYPKLQSSQAWQPGVAMPNLYKMQRMLLEKCDLQNYGDSATLPKGIMMNVAKYTQLCQYLNTLTLAVPYNMRVIHFGAGSDKGVAPGTAVLRQWLPTGTLLVDSDLNDFVSDADSTLIGDCATVHTANKWDLIISDMYDPKTKNVTKENDSKEGFFTYICGFIQQKLALGGSVAIKITEHSWNADLYKLMGHFAWWTAFVTNVNASSSEAFLIGCNYLGKPREQIDGYVMHANYIFWRNTNPIQLSSYSLFDMSKFPLKLRGTAVMSLKEGQINDMILSLLSKGRLIIRENNRVVISSDVLVNN

SEQ ID NO: 45 - DNA, 13209 bp, Severe acute respiratory syndrome coronavirus 2
atggagagccttgtccctggtttcaacgagaaaacacacgtccaactcagtttgcctgttttacaggttcgcgacgtgctcgtacgtggctttggagactccgtggaggaggtcttatcagaggcacgtcaacatcttaaagatggcacttgtggcttagtagaagttgaaaaaggcgttttgcctcaacttgaacagccctatgtgttcatcaaacgttcggatgctcgaactgcacctcatggtcatgttatggttgagctggtagcagaactcgaaggcattcagtacggtcgtagtggtgagacacttggtgtccttgtccctcatgtgggcgaaataccagtggcttaccgcaaggttcttcttcgtaagaacggtaataaaggagctggtggccatagttacggcgccgatctaaagtcatttgacttaggcgacgagcttggcactgatccttatgaagattttcaagaaaactggaacactaaacatagcagtggtgttacccgtgaactcatgcgtgagcttaacggaggggcatacactcgctatgtcgataacaacttctgtggccctgatggctaccctcttgagtgcattaaagaccttctagcacgtgctggtaaagcttcatgcactttgtctgaacaactggactttattgacactaagaggggtgtatactgctgccgtgaacatgagcatgaaattgcttggtacacggaacgttctgaaaagagctatgaattgcagacaccttttgaaattaaattggcaaagaaatttgacaccttcaatggggaatgtccaaattttgtatttcccttaaattccataatcaagactattcaaccaagggttgaaaagaaaaagcttgatggctttatgggtagaattcgatctgtctatccagttgcgtcaccaaatgaatgcaaccaaatgtgcctttcaactctcatgaagtgtgatcattgtggtgaaacttcatggcagacgggcgattttgttaaagccacttgcgaattttgtggcactgagaatttgactaaagaaggtgccactacttgtggttacttaccccaaaatgctgttgttaaaatttattgtccagcatgtcacaattcagaagtaggacctgagcatagtcttgccgaataccataatgaatctggcttgaaaaccattcttcgtaagggtggtcgcactattgcctttggaggctgtgtgttctcttatgttggttgccataacaagtgtgcctattgggttccacgtgctagcgctaacataggttgtaaccatacaggtgttgttggagaaggttccgaaggtcttaatgacaaccttcttgaaatactccaaaaagagaaagtcaacatcaatattgttggtgactttaaacttaatgaagagatcgccattattttggcatctttttctgcttccacaagtgcttttgtggaaactgtgaaaggtttggattataaagcattcaaacaaattgttgaatcctgtggtaattttaaagttacaaaaggaaaagctaaaaaaggtgcctggaatattggtgaacagaaatcaatactgagtcctctttatgcatttgcatcagaggctgctcgtgttgtacgatcaattttctcccgcactcttgaaactgctcaaaattctgtgcgtgttttacagaaggccgctataacaatactagatggaatttcacagtattcactgagactcattgatgctatgatgttcacatctgatttggctactaacaatctagttgtaatggcctacattacaggtggtgttgttcagttgacttcgcagtggctaactaacatctttggcactgtttatgaaaaactcaaacccgtccttgattggcttgaagagaagtttaaggaaggtgtagagtttcttagagacggttgggaaattgttaaatttatctcaacctgtgcttgtgaaattgtcggtggacaaattgtcacctgtgcaaaggaaattaaggagagtgttcagacattctttaagcttgtaaataaatttttggctttgtgtgctgactctatcattattggtggagctaaacttaaagccttgaatttaggtgaaacatttgtcacgcactcaaagggattgtacagaaagtgtgttaaatccagagaagaaactggcctactcatgcctctaaaagccccaaaagaaattatcttcttagagggagaaacacttcccacagaagtgttaacagaggaagttgtcttgaaaactggtgatttacaaccattagaacaacctactagtgaagctgttgaagctccattggttggtacaccagtttgtattaacgggcttatgttgctcgaaatcaaagacacagaaaagtactgtgcccttgcacctaatatgatggtaacaaacaataccttcacactcaaaggcggtgcaccaacaaaggttacttttggtgatgacactgtgatagaagtgcaaggttacaagagtgtgaatatcacttttgaacttgatgaaaggattgataaagtacttaatgagaagtgctctgcctatacagttgaactcggtacagaagtaaatgagttcgcctgtgttgtggcagatgctgtcataaaaactttgcaaccagtatctgaattacttacaccactgggcattgatttagatgagtggagtatggctacatactacttatttgatgagtctggtgagtttaaattggcttcacatatgtattgttctttttaccctccagatgaggatgaagaagaaggtgattgtgaagaagaagagtttgagccatcaactcaatatgagtatggtactgaagatgattaccaaggtaaacctttggaatttggtgccacttctgctgctcttcaacctgaagaagagcaagaagaagattggttagatgatgatagtcaacaaactgttggtcaacaagacggcagtgaggacaatcagacaactattattcaaacaattgttgaggttcaacctcaattagagatggaacttacaccagttgttcagactattgaagtgaatagttttagtggttatttaaaacttactgacaatgtatacattaaaaatgcagacattgtggaagaagctaaaaaggtaaaaccaacagtggttgttaatgcagccaatgtttaccttaaacatggaggaggtgttgcaggagccttaaataaggctactaacaatgccatgcaagttgaatctgatgattacatagctactaatggaccacttaaagtgggtggtagttgtgttttaagcggacacaatcttgctaaacactgtcttcatgttgtcggcccaaatgttaacaaaggtgaagacattcaacttcttaagagtgcttatgaaaattttaatcagcacgaagttctacttgcaccattattatcagctggtatttttggtgctgaccctatacattctttaagagtttgtgtagatactgttcgcacaaatgtctacttagctgtctttgataaaaatctctatgacaaacttgtttcaagctttttggaaatgaagagtgaaaagcaagttgaacaaaagatcgctgagattcctaaagaggaagttaagccatttataactgaaagtaaaccttcagttgaacagagaaaacaagatgataagaaaatcaaagcttgtgttgaagaagttacaacaactctggaagaaactaagttcctcacagaaaacttgttactttatattgacattaatggcaatcttcatccagattctgccactcttgttagtgacattgacatcactttcttaaagaaagatgctccatatatagtgggtgatgttgttcaagagggtgttttaactgctgtggttatacctactaaaaaggctggtggcactactgaaatgctagcgaaagctttgagaaaagtgccaacagacaattatataaccacttacccgggtcagggtttaaatggttacactgtagaggaggcaaagacagtgcttaaaaagtgtaaaagtgccttttacattctaccatctattatctctaatgagaagcaagaaattcttggaactgtttcttggaatttgcgagaaatgcttgcacatgcagaagaaacacgcaaattaatgcctgtctgtgtggaaactaaagccatagtttcaactatacagcgtaaatataagggtattaaaatacaagagggtgtggttgattatggtgctagattttacttttacaccagtaaaacaactgtagcgtcacttatcaacacacttaacgatctaaatgaaactcttgttacaatgccacttggctatgtaacacatggcttaaatttggaagaagctgctcggtatatgagatctctcaaagtgccagctacagtttctgtttcttcacctgatgctgttacagcgtataatggttatcttacttcttcttctaaaacacctgaagaacattttattgaaaccatctcacttgctggttcctataaagattggtcctattctggacaatctacacaactaggtatagaatttcttaagagaggtgataaaagtgtatattacactagtaatcctaccacattccacctagatggtgaagttatcacctttgacaatcttaagacacttctttctttgagagaagtgaggactattaaggtgtttacaacagtagacaacattaacctccacacgcaagttgtggacatgtcaatgacatatggacaacagtttggtccaacttatttggatggagctgatgttactaaaataaaacctcataattcacatgaaggtaaaacattttatgttttacctaatgatgacactctacgtgttgaggcttttgagtactaccacacaactgatcctagttttctgggtaggtacatgtcagcattaaatcacactaaaaagtggaaatacccacaagttaatggtttaacttctataaaatgggcagataacaactgttatcttgccactgcattgttaacactccaacaaatagagttgaagtttaatccacctgctctacaagatgcttattacagagcaagggctggtgaagctgataacttttgtgcacttatcttagcctactgtaataagacagtaggtgagttaggtgatgttagagaaacaatgagttacttgtttcaacatgccaatttagattcttgcaaaagagtcttgaacgtggtgtgtaaaacttgtggacaacagcagacaacccttaagggtgtagaagctgttatgtacatgggcacactttcttatgaacaatttaagaaaggtgttcagataccttgtacgtgtggtaaacaagctacaaaatatctagtacaacaggagtcaccttttgttatgatgtcagcaccacctgctcagtatgaacttaagcatggtacatttacttgtgctagtgagtacactggtaattaccagtgtggtcactataaacatataacttctaaagaaactttgtattgcatagacggtgctttacttacaaagtcctcagaatacaaaggtcctattacggatgttttctacaaagaaaacagttacacaacaaccataaaaccagttacttataaattggatggtgttgtttgtacagaaattgaccctaagttggacaattattataagaaagacaattcttattttacagagcaaccaattgatcttgtaccaaaccaaccatatccaaacgcaagcttcgataattttaagtttgtatgtgataatatcaaatttgctgatgatttaaaccagttaactggttataagaaacctgcttcaagagagcttaaagttacatttttccctgacttaaatggtgatgtggtggctattgattataaacactacacaccctcttttaagaaaggagctaaattgttacataaacctattgtttggcatgttaacaatgcaactaataaagccacgtataaaccaaatacctggtgtatacgttgtctttggagcacaaaaccagttgaaacatcaaattcgtttgatgtactgaagtcagaggacgcgcagggaatggataatcttgcctgcgaagatctaaaaccagtctctgaagaagtagtggaaaatcctaccatacagaaagacgttcttgagtgtaatgtgaaaactaccgaagttgtaggagacattatacttaaaccagcaaataatagtttaaaaattacagaagaggttggccacacagatctaatggctgcttatgtagacaattctagtcttactattaagaaacctaatgaattatctagagtattaggtttgaaaacccttgctactcatggtttagctgctgttaatagtgtcccttgggatactatagctaattatgctaagccttttcttaacaaagttgttagtacaactactaacatagttacacggtgtttaaaccgtgtttgtactaattatatgccttatttctttactttattgctacaattgtgtacttttactagaagtacaaattctagaattaaagcatctatgccgactactatagcaaagaatactgttaagagtgtcggtaaattttgtctagaggcttcatttaattatttgaagtcacctaatttttctaaactgataaatattacaatttggtttttactattaagtgtttgcctaggttctttaatctactcaaccgctgctttaggtgttttaatgtctaatttaggcatgccttcttactgtactggttacagagaaggctatttgaactctactaatgtcactattgcaacctactgtactggttctataccttgtagtgtttgtcttagtggtttagattctttagacacctatccttctttagaaactatacaaattaccatttcatcttttaaatgggatttaactgcttttggcttagttgcagagtggtttttggcatatattcttttcactaggtttttctatgtacttggattggctgcaatcatgcaattgtttttcagctattttgcagtacattttattagtaattcttggcttatgtggttaataattaatcttgtacaaatggccccgatttcagctatggttagaatgtacatcttctttgcatcattttattatgtatggaaaagttatgtgcatgttgtagacggttgtaattcatcaacttgtatgatgtgttacaaacgtaatagagcaacaagagtcgaatgtacaactattgttaatggtgttagaaggtccttttatgtctatgctaatggaggtaaaggcttttgcaaactacacaattggaattgtgttaattgtgatacattctgtgctggtagtacatttattagtgatgaagttgcgagagacttgtcactacagtttaaaagaccaataaatcctactgaccagtcttcttacatcgttgatagtgttacagtgaagaatggttccatccatctttactttgataaagctggtcaaaagacttatgaaagacattctctctctcattttgttaacttagacaacctgagagctaataacactaaaggttcattgcctattaatgttatagtttttgatggtaaatcaaaatgtgaagaatcatctgcaaaatcagcgtctgtttactacagtcagcttatgtgtcaacctatactgttactagatcaggcattagtgtctgatgttggtgatagtgcggaagttgcagttaaaatgtttgatgcttacgttaatacgttttcatcaacttttaacgtaccaatggaaaaactcaaaacactagttgcaactgcagaagctgaacttgcaaagaatgtgtccttagacaatgtcttatctacttttatttcagcagctcggcaagggtttgttgattcagatgtagaaactaaagatgttgttgaatgtcttaaattgtcacatcaatctgacatagaagttactggcgatagttgtaataactatatgctcacctataacaaagttgaaaacatgacaccccgtgaccttggtgcttgtattgactgtagtgcgcgtcatattaatgcgcaggtagcaaaaagtcacaacattgctttgatatggaacgttaaagatttcatgtcattgtctgaacaactacgaaaacaaatacgtagtgctgctaaaaagaataacttaccttttaagttgacatgtgcaactactagacaagttgttaatgttgtaacaacaaagatagcacttaagggtggtaaaattgttaataattggttgaagcagttaattaaagttacacttgtgttcctttttgttgctgctattttctatttaataacacctgttcatgtcatgtctaaacatactgacttttcaagtgaaatcataggatacaaggctattgatggtggtgtcactcgtgacatagcatctacagatacttgttttgctaacaaacatgctgattttgacacatggtttagccagcgtggtggtagttatactaatgacaaagcttgcccattgattgctgcagtcataacaagagaagtgggttttgtcgtgcctggtttgcctggcacgatattacgcacaactaatggtgactttttgcatttcttacctagagtttttagtgcagttggtaacatctgttacacaccatcaaaacttatagagtacactgactttgcaacatcagcttgtgttttggctgctgaatgtacaatttttaaagatgcttctggtaagccagtaccatattgttatgataccaatgtactagaaggttctgttgcttatgaaagtttacgccctgacacacgttatgtgctcatggatggctctattattcaatttcctaacacctaccttgaaggttctgttagagtggtaacaacttttgattctgagtactgtaggcacggcacttgtgaaagatcagaagctggtgtttgtgtatctactagtggtagatgggtacttaacaatgattattacagatctttaccaggagttttctgtggtgtagatgctgtaaatttacttactaatatgtttacaccactaattcaacctattggtgctttggacatatcagcatctatagtagctggtggtattgtagctatcgtagtaacatgccttgcctactattttatgaggtttagaagagcttttggtgaatacagtcatgtagttgcctttaatactttactattccttatgtcattcactgtactctgtttaacaccagtttactcattcttacctggtgtttattctgttatttacttgtacttgacattttatcttactaatgatgtttcttttttagcacatattcagtggatggttatgttcacacctttagtacctttctggataacaattgcttatatcatttgtatttccacaaagcatttctattggttctttagtaattacctaaagagacgtgtagtctttaatggtgtttcctttagtacttttgaagaagctgcgctgtgcacctttttgttaaataaagaaatgtatctaaagttgcgtagtgatgtgctattacctcttacgcaatataatagatacttagctctttataataagtacaagtattttagtggagcaatggatacaactagctacagagaagctgcttgttgtcatctcgcaaaggctctcaatgacttcagtaactcaggttctgatgttctttaccaaccaccacaaacctctatcacctcagctgttttgcagagtggttttagaaaaatggcattcccatctggtaaagttgagggttgtatggtacaagtaacttgtggtacaactacacttaacggtctttggcttgatgacgtagtttactgtccaagacatgtgatctgcacctctgaagacatgcttaaccctaattatgaagatttactcattcgtaagtctaatcataatttcttggtacaggctggtaatgttcaactcagggttattggacattctatgcaaaattgtgtacttaagcttaaggttgatacagccaatcctaagacacctaagtataagtttgttcgcattcaaccaggacagactttttcagtgttagcttgttacaatggttcaccatctggtgtttaccaatgtgctatgaggcccaatttcactattaagggttcattccttaatggttcatgtggtagtgttggttttaacatagattatgactgtgtctctttttgttacatgcaccatatggaattaccaactggagttcatgctggcacagacttagaaggtaacttttatggaccttttgttgacaggcaaacagcacaagcagctggtacggacacaactattacagttaatgttttagcttggttgtacgctgctgttataaatggagacaggtggtttctcaatcgatttaccacaactcttaatgactttaaccttgtggctatgaagtacaattatgaacctctaacacaagaccatgttgacatactaggacctctttctgctcaaactggaattgccgttttagatatgtgtgcttcattaaaagaattactgcaaaatggtatgaatggacgtaccatattgggtagtgctttattagaagatgaatttacaccttttgatgttgttagacaatgctcaggtgttactttccaaagtgcagtgaaaagaacaatcaagggtacacaccactggttgttactcacaattttgacttcacttttagttttagtccagagtactcaatggtctttgttcttttttttgtatgaaaatgcctttttaccttttgctatgggtattattgctatgtctgcttttgcaatgatgtttgtcaaacataagcatgcatttctctgtttgtttttgttaccttctcttgccactgtagcttattttaatatggtctatatgcctgctagttgggtgatgcgtattatgacatggttggatatggttgatactagtttgaagctaaaagactgtgttatgtatgcatcagctgtagtgttactaatccttatgacagcaagaactgtgtatgatgatggtgctaggagagtgtggacacttatgaatgtcttgacactcgtttataaagtttattatggtaatgctttagatcaagccatttccatgtgggctcttataatctctgttacttctaactactcaggtgtagttacaactgtcatgtttttggccagaggtattgtttttatgtgtgttgagtattgccctattttcttcataactggtaatacacttcagtgtataatgctagtttattgtttcttaggctatttttgtacttgttactttggcctcttttgtttactcaaccgctactttagactgactcttggtgtttatgattacttagtttctacacaggagtttagatatatgaattcacagggactactcccacccaagaatagcatagatgccttcaaactcaacattaaattgttgggtgttggtggcaaaccttgtatcaaagtagccactgtacagtctaaaatgtcagatgtaaagtgcacatcagtagtcttactctcagttttgcaacaactcagagtagaatcatcatctaaattgtgggctcaatgtgtccagttacacaatgacattctcttagctaaagatactactgaagcctttgaaaaaatggtttcactactttctgttttgctttccatgcagggtgctgtagacataaacaagctttgtgaagaaatgctggacaacagggcaaccttacaagctatagcctcagagtttagttcccttccatcatatgcagcttttgctactgctcaagaagcttatgagcaggctgttgctaatggtgattctgaagttgttcttaaaaagttgaagaagtctttgaatgtggctaaatctgaatttgaccgtgatgcagccatgcaacgtaagttggaaaagatggctgatcaagctatgacccaaatgtataaacaggctagatctgaggacaagagggcaaaagttactagtgctatgcagacaatgcttttcactatgcttagaaagttggataatgatgcactcaacaacattatcaacaatgcaagagatggttgtgttcccttgaacataatacctcttacaacagcagccaaactaatggttgtcataccagactataacacatataaaaatacgtgtgatggtacaacatttacttatgcatcagcattgtgggaaatccaacaggttgtagatgcagatagtaaaattgttcaacttagtgaaattagtatggacaattcacctaatttagcatggcctcttattgtaacagctttaagggccaattctgctgtcaaattacagaataatgagcttagtcctgttgcactacgacagatgtcttgtgctgccggtactacacaaactgcttgcactgatgacaatgcgttagcttactacaacacaacaaagggaggtaggtttgtacttgcactgttatccgatttacaggatttgaaatgggctagattccctaagagtgatggaactggtactatctatacagaactggaaccaccttgtaggtttgttacagacacacctaaaggtcctaaagtgaagtatttatactttattaaaggattaaacaacctaaatagaggtatggtacttggtagtttagctgccacagtacgtctacaagctggtaatgcaacagaagtgcctgccaattcaactgtattatctttctgtgcttttgctgtagatgctgctaaagcttacaaagattatctagctagtgggggacaaccaatcactaattgtgttaagatgttgtgtacacacactggtactggtcaggcaataacagttacaccggaagccaatatggatcaagaatcctttggtggtgcatcgtgttgtctgtactgccgttgccacatagatcatccaaatcctaaaggattttgtgacttaaaaggtaagtatgtacaaatacctacaacttgtgctaatgaccctgtgggttttacacttaaaaacacagtctgtaccgtctgcggtatgtggaaaggttatggctgtagttgtgatcaactccgcgaacccatgcttcagtcagctgatgcacaatcgtttttaaacgggtttgcggtgtaa

SEQ ID NO: 46 - protein, 4402 aa, Severe acute respiratory syndrome coronavirus 2
MESLVPGFNEKTHVQLSLPVLQVRDVLVRGFGDSVEEVLSEARQHLKDGTCGLVEVEKGVLPQLEQPYVFIKRSDARTAPHGHVMVELVAELEGIQYGRSGETLGVLVPHVGEIPVAYRKVLLRKNGNKGAGGHSYGADLKSFDLGDELGTDPYEDFQENWNTKHSSGVTRELMRELNGGAYTRYVDNNFCGPDGYPLECIKDLLARAGKASCTLSEQLDFIDTKRGVYCCREHEHEIAWYTERSEKSYELQTPFEIKLAKKFDTFNGECPNFVFPLNSIIKTIQPRVEKKKLDGFMGRIRSVYPVASPNECNQMCLSTLMKCDHCGETSWQTGDFVKATCEFCGTENLTKEGATTCGYLPQNAVVKIYCPACHNSEVGPEHSLAEYHNESGLKTILRKGGRTIAFGGCVFSYVGCHNKCAYWVPRASANIGCNHTGVVGEGSEGLNDNLLEILQKEKVNINIVGDFKLNEEIAIILASFSASTSAFVETVKGLDYKAFKQIVESCGNFKVTKGKAKKGAWNIGEQKSILSPLYAFASEAARVVRSIFSRTLETAQNSVRVLQKAAITILDGISQYSLRLIDAMMFTSDLATNNLVVMAYITGGVVQLTSQWLTNIFGTVYEKLKPVLDWLEEKFKEGVEFLRDGWEIVKFISTCACEIVGGQIVTCAKEIKESVQTFFKLVNKFLALCADSIIIGGAKLKALNLGETFVTHSKGLYRKCVKSREETGLLMPLKAPKEIIFLEGETLPTEVLTEEVVLKTGDLQPLEQPTSEAVEAPLVGTPVCINGLMLLEIKDTEKYCALAPNMMVTNNTFTLKGGAPTKVTFGDDTVIEVQGYKSVNITFELDERIDKVLNEKCSAYTVELGTEVNEFACVVADAVIKTLQPVSELLTPLGIDLDEWSMATYYLFDESGEFKLASHMYCSFYPPDEDEEEGDCEEEEFEPSTQYEYGTEDDYQGKPLEFGATSAALQPEEEQEEDWLDDDSQQTVGQQDGSEDNQTTIIQTIVEVQPQLEMELTPVVQTIEVNSFSGYLKLTDNVYIKNADIVEEAKKVKPTVVVNAANVYLKHGGGVAGALNKATNNAMQVESDDYIATNGPLKVGGSCVLSGHNLAKHCLHVVGPNVNKGEDIQLLKSAYENFNQHEVLLAPLLSAGIFGADPIHSLRVCVDTVRTNVYLAVFDKNLYDKLVSSFLEMKSEKQVEQKIAEIPKEEVKPFITESKPSVEQRKQDDKKIKACVEEVTTTLEETKFLTENLLLYIDINGNLHPDSATLVSDIDITFLKKDAPYIVGDVVQEGVLTAVVIPTKKAGGTTEMLAKALRKVPTDNYITTYPGQGLNGYTVEEAKTVLKKCKSAFYILPSIISNEKQEILGTVSWNLREMLAHAEETRKLMPVCVETKAIVSTIQRKYKGIKIQEGVVDYGARFYFYTSKTTVASLINTLNDLNETLVTMPLGYVTHGLNLEEAARYMRSLKVPATVSVSSPDAVTAYNGYLTSSSKTPEEHFIETISLAGSYKDWSYSGQSTQLGIEFLKRGDKSVYYTSNPTTFHLDGEVITFDNLKTLLSLREVRTIKVFTTVDNINLHTQVVDMSMTYGQQFGPTYLDGADVTKIKPHNSHEGKTFYVLPNDDTLRVEAFEYYHTTDPSFLGRYMSALNHTKKWKYPQVNGLTSIKWADNNCYLATALLTLQQIELKFNPPALQDAYYRARAGEADNFCALILAYCNKTVGELGDVRETMSYLFQHANLDSCKRVLNVVCKTCGQQQTTLKGVEAVMYMGTLSYEQFKKGVQIPCTCGKQATKYLVQQESPFVMMSAPPAQYELKHGTFTCASEYTGNYQCGHYKHITSKETLYCIDGALLTKSSEYKGPITDVFYKENSYTTTIKPVTYKLDGVVCTEIDPKLDNYYKKDNSYFTEQPIDLVPNQPYPNASFDNFKFVCDNIKFADDLNQLTGYKKPASRELKVTFFPDLNGDVVAIDYKHYTPSFKKGAKLLHKPIVWHVNNATNKATYKPNTWCIRCLWSTKPVETSNSFDVLKSEDAQGMDNLACEDLKPVSEEVVENPTIQKDVLECNVKTTEVVGDIILKPANNSLKITEEVGHTDLMAAYVDNSSLTIKKPNELSRVLGLKTLATHGLAAVNSVPWDTIANYAKPFLNKVVSTTTNIVTRCLNRVCTNYMPYFFTLLLQLCTFTRSTNSRIKASMPTTIAKNTVKSVGKFCLEASFNYLKSPNFSKLINITIWFLLLSVCLGSLIYSTAALGVLMSNLGMPSYCTGYREGYLNSTNVTIATYCTGSIPCSVCLSGLDSLDTYPSLETIQITISSFKWDLTAFGLVAEWFLAYILFTRFFYVLGLAAIMQLFFSYFAVHFISNSWLMWLIINLVQMAPISAMVRMYIFFASFYYVWKSYVHVVDGCNSSTCMMCYKRNRATRVECTTIVNGVRRSFYVYANGGKGFCKLHNWNCVNCDTFCAGSTFISDEVARDLSLQFKRPINPTDQSSYIVDSVTVKNGSIHLYFDKAGQKTYERHSLSHFVNLDNLRANNTKGSLPINVIVFDGKSKCEESSAKSASVYYSQLMCQPILLLDQALVSDVGDSAEVAVKMFDAYVNTFSSTFNVPMEKLKTLVATAEAELAKNVSLDNVLSTFISAARQGFVDSDVETKDVVECLKLSHQSDIEVTGDSCNNYMLTYNKVENMTPRDLGACIDCSARHINAQVAKSHNIALIWNVKDFMSLSEQLRKQIRSAAKKNNLPFKLTCATTRQVVNVVTTKIALKGGKIVNNWLKQLIKVTLVFLFVAAIFYLITPVHVMSKHTDFSSEIIGYKAIDGGVTRDIASTDTCFANKHADFDTWFSQRGGSYTNDKACPLIAAVITREVGFVVPGLPGTILRTTNGDFLHFLPRVFSAVGNICYTPSKLIEYTDFATSACVLAAECTIFKDASGKPVPYCYDTNVLEGSVAYESLRPDTRYVLMDGSIIQFPNTYLEGSVRVVTTFDSEYCRHGTCERSEAGVCVSTSGRWVLNNDYYRSLPGVFCGVDAVNLLTNMFTPLIQPIGALDISASIVAGGIVAIVVTCLAYYFMRFRRAFGEYSHVVAFNTLLFLMSFTVLCLTPVYSFLPGVYSVIYLYLTFYLTNDVSFLAHIQWMVMFTPLVPFWITIAYIICISTKHFYWFFSNYLKRRVVFNGVSFSTFEEAALCTFLLNKEMYLKLRSDVLLPLTQYNRYLALYNKYKYFSGAMDTTSYREAACCHLAKALNDFSNSGSDVLYQPPQTSITSAVLQSGFRKMAFPSGKVEGCMVQVTCGTTTLNGLWLDDVVYCPRHVICTSEDMLNPNYEDLLIRKSNHNFLVQAGNVQLRVIGHSMQNCVLKLKVDTANPKTPKYKFVRIQPGQTFSVLACYNGSPSGVYQCAMRPNFTIKGSFLNGSCGSVGFNIDYDCVSFCYMHHMELPTGVHAGTDLEGNFYGPFVDRQTAQAAGTDTTITVNVLAWLYAAVINGDRWFLNRFTTTLNDFNLVAMKYNYEPLTQDHVDILGPLSAQTGIAVLDMCASLKELLQNGMNGRTILGSALLEDEFTPFDVVRQCSGVTFQSAVKRTIKGTHHWLLLTILTSLLVLVQSTQWSLFFFLYENAFLPFAMGIIAMSAFAMMFVKHKHAFLCLFLLPSLATVAYFNMVYMPASWVMRIMTWLDMVDTSLKLKDCVMYASAVVLLILMTARTVYDDGARRVWTLMNVLTLVYKVYYGNALDQAISMWALIISVTSNYSGVVTTVMFLARGIVFMCVEYCPIFFITGNTLQCIMLVYCFLGYFCTCYFGLFCLLNRYFRLTLGVYDYLVSTQEFRYMNSQGLLPPKNSIDAFKLNIKLLGVGGKPCIKVATVQSKMSDVKCTSVVLLSVLQQLRVESSSKLWAQCVQLHNDILLAKDTTEAFEKMVSLLSVLLSMQGAVDINKLCEEMLDNRATLQAIASEFSSLPSYAAFATAQEAYEQAVANGDSEVVLKKLKKSLNVAKSEFDRDAAMQRKLEKMADQAMTQMYKQARSEDKRAKVTSAMQTMLFTMLRKLDNDALNNIINNARDGCVPLNIIPLTTAAKLMVVIPDYNTYKNTCDGTTFTYASALWEIQQVVDADSKIVQLSEISMDNSPNLAWPLIVTALRANSAVKLQNNELSPVALRQMSCAAGTTQTACTDDNALAYYNTTKGGRFVLALLSDLQDLKWARFPKSDGTGTIYTELEPPCRFVTDTPKGPKVKYLYFIKGLNNLNRGMVLGSLAATVRLQAGNATEVPANSTVLSFCAFAVDAAKAYKDYLASGGQPITNCVKMLCTHTGTGQAITVTPEANMDQESFGGASCCLYCRCHIDHPNPKGFCDLKGKYVQIPTTCANDPVGFTLKNTVCTVCGMWKGYGCSCDQLREPMLQSADAQSFLNGFAV

SEQ ID NO: 47 - DNA, 3813 bp, Severe acute respiratory syndrome coronavirus 2
atgtttgtttttcttgttttattgccactagtctctagtcagtgtgttaatcttacaaccagaactcaattaccccctgcatacactaattctttcacacgtggtgtttattaccctgacaaagttttcagatcctcagttttacattcaactcaggacttgttcttacctttcttttccaatgttacttggttccatgctatctctgggaccaatggtactaagaggtttgataaccctgtcctaccatttaatgatggtgtttattttgcttccactgagaagtctaacataataagaggctggatttttggtactactttagattcgaagacccagtccctacttattgttaataacgctactaatgttgttattaaagtctgtgaatttcaattttgtaatgatccatttttgggtgtttaccacaaaaacaacaaaagttggatggaaagtgagttcagagtttattctagtgcgaataattgcacttttgaatatgtctctcagccttttcttatggaccttgaaggaaaacagggtaatttcaaaaatcttagggaatttgtgtttaagaatattgatggttattttaaaatatattctaagcacacgcctattaatttagtgcgtgatctccctcagggtttttcggctttagaaccattggtagatttgccaataggtattaacatcactaggtttcaaactttacttgctttacatagaagttatttgactcctggtgattcttcttcaggttggacagctggtgctgcagcttattatgtgggttatcttcaacctaggacttttctattaaaatataatgaaaatggaaccattacagatgctgtagactgtgcacttgaccctctctcagaaacaaagtgtacgttgaaatccttcactgtagaaaaaggaatctatcaaacttctaactttagagtccaaccaacagaatctattgttagatttcctaatattacaaacttgtgcccttttggtgaagtttttaacgccaccagatttgcatctgtttatgcttggaacaggaagagaatcagcaactgtgttgctgattattctgtcctatataattccgcatcattttccacttttaagtgttatggagtgtctcctactaaattaaatgatctctgctttactaatgtctatgcagattcatttgtaattagaggtgatgaagtcagacaaatcgctccagggcaaactggaaagattgctgattataattataaattaccagatgattttacaggctgcgttatagcttggaattctaacaatcttgattctaaggttggtggtaattataattacctgtatagattgtttaggaagtctaatctcaaaccttttgagagagatatttcaactgaaatctatcaggccggtagcacaccttgtaatggtgttgaaggttttaattgttactttcctttacaatcatatggtttccaacccacttatggtgttggttaccaaccatacagagtagtagtactttcttttgaacttctacatgcaccagcaactgtttgtggacctaaaaagtctactaatttggttaaaaacaaatgtgtcaatttcaacttcaatggtttaacaggcacaggtgttcttactgagtctaacaaaaagtttctgcctttccaacaatttggcagagacattgatgacactactgatgctgtccgtgatccacagacacttgagattcttgacattacaccatgttcttttggtggtgtcagtgttataacaccaggaacaaatacttctaaccaggttgctgttctttatcagggtgttaactgcacagaagtccctgttgctattcatgcagatcaacttactcctacttggcgtgtttattctacaggttctaatgtttttcaaacacgtgcaggctgtttaataggggctgaacatgtcaacaactcatatgagtgtgacatacccattggtgcaggtatatgcgctagttatcagactcagactaattctcatcggcgggcacgtagtgtagctagtcaatccatcattgcctacactatgtcacttggtgcagaaaattcagttgcttactctaataactctattgccatacccataaattttactattagtgttaccacagaaattctaccagtgtctatgaccaagacatcagtagattgtacaatgtacatttgtggtgattcaactgaatgcagcaatcttttgttgcaatatggcagtttttgtacacaattaaaccgtgctttaactggaatagctgttgaacaagacaaaaacacccaagaagtttttgcacaagtcaaacaaatttacaaaacaccaccaattaaagattttggtggttttaatttttcacaaatattaccagatccatcaaaaccaagcaagaggtcatttattgaagatctacttttcaacaaagtgacacttgcagatgctggcttcatcaaacaatatggtgattgccttggtgatattgctgctagagacctcatttgtgcacaaaagtttaacggccttactgttttgccacctttgctcacagatgaaatgattgctcaatacacttctgcactgttagcgggtacaatcacttctggttggacctttggtgcaggtgctgcattacaaataccatttgctatgcaaatggcttataggtttaatggtattggagttacacagaatgttctctatgagaaccaaaaattgattgccaaccaatttaatagtgctattggcaaaattcaagactcactttcttccacagcaagtgcacttggaaaacttcaagatgtggtcaaccaaaatgcacaagctttaaacacgcttgttaaacaacttagctccaattttggtgcaatttcaagtgttttaaatgatatccttgcacgtcttgacaaagttgaggctgaagtgcaaattgataggttgatcacaggcagacttcaaagtttgcagacatatgtgactcaacaattaattagagctgcagaaatcagagcttctgctaatcttgctgctactaaaatgtcagagtgtgtacttggacaatcaaaaagagttgatttttgtggaaagggctatcatcttatgtccttccctcagtcagcacctcatggtgtagtcttcttgcatgtgacttatgtccctgcacaagaaaagaacttcacaactgctcctgccatttgtcatgatggaaaagcacactttcctcgtgaaggtgtctttgtttcaaatggcacacactggtttgtaacacaaaggaatttttatgaaccacaaatcattactacacacaacacatttgtgtctggtaactgtgatgttgtaataggaattgtcaacaacacagtttatgatcctttgcaacctgaattagactcattcaaggaggagttagataaatattttaagaatcatacatcaccagatgttgatttaggtgacatctctggcattaatgcttcagttgtaaacattcaaaaagaaattgaccgcctcaatgaggttgccaagaatttaaatgaatctctcatcgatctccaagaacttggaaagtatgagcagtatataaaatggccatggtacatttggctaggttttatagctggcttgattgccatagtaatggtgacaattatgctttgctgtatgaccagttgctgtagttgtctcaagggctgttgttcttgtggatcctgctgcaaatttgatgaagacgactctgagccagtgctcaaaggagtcaaattacattacacataa

SEQ ID NO: 48 - protein, 1270 aa, Severe acute respiratory syndrome coronavirus 2
MFVFLVLLPLVSSQCVNLTTRTQLPPAYTNSFTRGVYYPDKVFRSSVLHSTQDLFLPFFSNVTWFHAISGTNGTKRFDNPVLPFNDGVYFASTEKSNIIRGWIFGTTLDSKTQSLLIVNNATNVVIKVCEFQFCNDPFLGVYHKNNKSWMESEFRVYSSANNCTFEYVSQPFLMDLEGKQGNFKNLREFVFKNIDGYFKIYSKHTPINLVRDLPQGFSALEPLVDLPIGINITRFQTLLALHRSYLTPGDSSSGWTAGAAAYYVGYLQPRTFLLKYNENGTITDAVDCALDPLSETKCTLKSFTVEKGIYQTSNFRVQPTESIVRFPNITNLCPFGEVFNATRFASVYAWNRKRISNCVADYSVLYNSASFSTFKCYGVSPTKLNDLCFTNVYADSFVIRGDEVRQIAPGQTGKIADYNYKLPDDFTGCVIAWNSNNLDSKVGGNYNYLYRLFRKSNLKPFERDISTEIYQAGSTPCNGVEGFNCYFPLQSYGFQPTYGVGYQPYRVVVLSFELLHAPATVCGPKKSTNLVKNKCVNFNFNGLTGTGVLTESNKKFLPFQQFGRDIDDTTDAVRDPQTLEILDITPCSFGGVSVITPGTNTSNQVAVLYQGVNCTEVPVAIHADQLTPTWRVYSTGSNVFQTRAGCLIGAEHVNNSYECDIPIGAGICASYQTQTNSHRRARSVASQSIIAYTMSLGAENSVAYSNNSIAIPINFTISVTTEILPVSMTKTSVDCTMYICGDSTECSNLLLQYGSFCTQLNRALTGIAVEQDKNTQEVFAQVKQIYKTPPIKDFGGFNFSQILPDPSKPSKRSFIEDLLFNKVTLADAGFIKQYGDCLGDIAARDLICAQKFNGLTVLPPLLTDEMIAQYTSALLAGTITSGWTFGAGAALQIPFAMQMAYRFNGIGVTQNVLYENQKLIANQFNSAIGKIQDSLSSTASALGKLQDVVNQNAQALNTLVKQLSSNFGAISSVLNDILARLDKVEAEVQIDRLITGRLQSLQTYVTQQLIRAAEIRASANLAATKMSECVLGQSKRVDFCGKGYHLMSFPQSAPHGVVFLHVTYVPAQEKNFTTAPAICHDGKAHFPREGVFVSNGTHWFVTQRNFYEPQIITTHNTFVSGNCDVVIGIVNNTVYDPLQPELDSFKEELDKYFKNHTSPDVDLGDISGINASVVNIQKEIDRLNEVAKNLNESLIDLQELGKYEQYIKWPWYIWLGFIAGLIAIVMVTIMLCCMTSCCSCLKGCCSCGSCCKFDEDDSEPVLKGVKLHYT

SEQ ID NO: 49 - DNA, 828 bp, Severe acute respiratory syndrome coronavirus 2; identical to SEQ ID NO: 25

SEQ ID NO: 50 - protein, 275 aa, Severe acute respiratory syndrome coronavirus 2; identical to SEQ ID NO: 26

SEQ ID NO: 51 - DNA, 228 bp, Severe acute respiratory syndrome coronavirus 2; identical to SEQ ID NO: 27

SEQ ID NO: 52 - protein, 75 aa, Severe acute respiratory syndrome coronavirus 2; identical to SEQ ID NO: 28

SEQ ID NO: 53 - DNA, 669 bp, Severe acute respiratory syndrome coronavirus 2; identical to SEQ ID NO: 29

SEQ ID NO: 54 - protein, 222 aa, Severe acute respiratory syndrome coronavirus 2; identical to SEQ ID NO: 30

SEQ ID NO: 55 - DNA, 186 bp, Severe acute respiratory syndrome coronavirus 2; identical to SEQ ID NO: 31

SEQ ID NO: 56 - protein, 61 aa, Severe acute respiratory syndrome coronavirus 2; identical to SEQ ID NO: 32

SEQ ID NO: 57 - DNA, 366 bp, Severe acute respiratory syndrome coronavirus 2; identical to SEQ ID NO: 33

SEQ ID NO: 58 - protein, 121 aa, Severe acute respiratory syndrome coronavirus 2; identical to SEQ ID NO: 34

SEQ ID NO: 59 - DNA, 132 bp, Severe acute respiratory syndrome coronavirus 2; identical to SEQ ID NO: 35

SEQ ID NO: 60 - protein, 43 aa, Severe acute respiratory syndrome coronavirus 2; identical to SEQ ID NO: 36

SEQ ID NO: 61 - DNA, 81 bp, Severe acute respiratory syndrome coronavirus 2
atgaaatttcttgttttcttaggaatcatcacaactgtagctgcatttcaccaagaatgtagtttacagtcatgtacttaa

SEQ ID NO: 62 - protein, 26 aa, Severe acute respiratory syndrome coronavirus 2
MKFLVFLGIITTVAAFHQECSLQSCT

SEQ ID NO: 63 - DNA, 1260 bp, Severe acute respiratory syndrome coronavirus 2
atgtctctaaatggaccccaaaatcagcgaaatgcaccccgcattacgtttggtggaccctcagattcaactggcagtaaccagaatggagaacgcagtggggcgcgatcaaaacaacgtcggccccaaggtttacccaataatactgcgtcttggttcaccgctctcactcaacatggcaaggaagaccttaaattccctcgaggacaaggcgttccaattaacaccaatagcagtccagatgaccaaattggctactaccgaagagctaccagacgaattcgtggtggtgacggtaaaatgaaagatctcagtccaagatggtatttctactacctaggaactgggccagaagctggacttccctatggtgctaacaaagacggcatcatatgggttgcaactgagggagccttgaatacaccaaaagatcacattggcacccgcaatcctgctaacaatgctgcaatcgtgctacaacttcctcaaggaacaacattgccaaaaggcttctacgcagaagggagcagaggcggcagtcaagcctcttctcgttcctcatcacgtagtcgcaacagttcaagaaattcaactccaggcagcagtaaacgaacttctcctgctagaatggctggcaatggcggtgatgcggctcttgctttgctgctgcttgacagattgaaccagcttgagagcaaaatgtttggtaaaggccaacaacaacaaggccaaactgtcactaagaaatctgctgctgaggcttctaagaagcctcggcaaaaacgtactgccactaaagcatacaatgtaacacaagctttcggcagacgtggtccagaacaaacccaaggaaattttggggaccaggaactaatcagacaaggaactgattacaaacattggccgcaaattgcacaatttgcccccagcgcttcagcgttcttcggaatgtcgcgcattggcatggaagtcacaccttcgggaacgtggttgacctacacaggtgccatcaaattggatgacaaagatccaaatttcaaagatcaagtcattttgctgaataagcatattgacgcatacaaaacattcccaccaacagagcctaaaaaggacaaaaagaagaaggctgatgaaactcaagccttaccgcagagacagaagaaacagcaaactgtgactcttcttcctgctgcagatttggatgatttctccaaacaattgcaacaatccatgagcagtgctgactcaactcaggcctaa

SEQ ID NO: 64 - protein, 419 aa, Severe acute respiratory syndrome coronavirus 2
MSLNGPQNQRNAPRITFGGPSDSTGSNQNGERSGARSKQRRPQGLPNNTASWFTALTQHGKEDLKFPRGQGVPINTNSSPDDQIGYYRRATRRIRGGDGKMKDLSPRWYFYYLGTGPEAGLPYGANKDGIIWVATEGALNTPKDHIGTRNPANNAAIVLQLPQGTTLPKGFYAEGSRGGSQASSRSSSRSRNSSRNSTPGSSKRTSPARMAGNGGDAALALLLLDRLNQLESKMFGKGQQQQGQTVTKKSAAEASKKPRQKRTATKAYNVTQAFGRRGPEQTQGNFGDQELIRQGTDYKHWPQIAQFAPSASAFFGMSRIGMEVTPSGTWLTYTGAIKLDDKDPNFKDQVILLNKHIDAYKTFPPTEPKKDKKKKADETQALPQRQKKQQTVTLLPAADLDDFSKQLQQSMSSADSTQA

SEQ ID NO: 65 - DNA, 117 bp, Severe acute respiratory syndrome coronavirus 2; identical to SEQ ID NO: 41

SEQ ID NO: 66 - protein, 38 aa, Severe acute respiratory syndrome coronavirus 2; identical to SEQ ID NO: 42

SEQ ID NO: 67 - DNA, 21291 bp, Severe acute respiratory syndrome coronavirus 2
atggagagccttgtccctggtttcaacgagaaaacacacgtccaactcagtttgcctgttttacaggttcgcgacgtgctcgtacgtggctttggagactccgtggaggaggtcttatcagaggcacgtcaacatcttaaagatggcacttgtggcttagtagaagttgaaaaaggcgttttgcctcaacttgaacagccctatgtgttcatcaaacgttcggatgctcgaactgcacctcatggtcatgttatggttgagctggtagcagaactcgaaggcattcagtacggtcgtagtggtgagacacttggtgtccttgtccctcatgtgggcgaaataccagtggcttaccgcaaggttcttcttcgtaagaacggtaataaaggagctggtggccatagttacggcgccgatctaaagtcatttgacttaggcgacgagcttggcactgatccttatgaagattttcaagaaaactggaacactaaacatagcagtggtgttacccgtgaactcatgcgtgagcttaacggaggggcatacactcgctatgtcgataacaacttctgtggccctgatggctaccctcttgagtgcattaaagaccttctagcacgtgctggtaaagcttcatgcactttgtccgaacaactggactttattgacactaagaggggtgtatactgctgccgtgaacatgagcatgaaattgcttggtacacggaacgttctgaaaagagctatgaattgcagacaccttttgaaattaaattggcaaagaaatttgacaccttcaatggggaatgtccaaattttgtatttcccttaaattccataatcaagactattcaaccaagggttgaaaagaaaaagcttgatggctttatgggtagaattcgatctgtctatccagttgcgtcaccaaatgaatgcaaccaaatgtgcctttcaactctcatgaagtgtgatcattgtggtgaaacttcatggcagacgggcgattttgttaaagccacttgcgaattttgtggcactgagaatttgactaaagaaggtgccactacttgtggttacttaccccaaaatgctgttgttaaaatttattgtccagcatgtcacaattcagaagtaggacctgagcatagtcttgccgaataccataatgaatctggcttgaaaaccattcttcgtaagggtggtcgcactattgcctttggaggctgtgtgttctcttatgttggttgccataacaagtgtgcctattgggttccacgtgctagcgctaacataggttgtaaccatacaggtgttgttggagaaggttccgaaggtcttaatgacaaccttcttgaaatactccaaaaagagaaagtcaacatcaatattgttggtgactttaaacttaatgaagagatcgccattattttggcatctttttctgcttccacaagtgcttttgtggaaactgtgaaaggtttggattataaagcattcaaacaaattgttgaatcctgtggtaattttaaagttacaaaaggaaaagctaaaaaaggtgcctggaatattggtgaacagaaatcaatactgagtcctctttatgcatttgcatcagaggctgctcgtgttgtacgatcaattttctcccgcactcttgaaactgctcaaaattctgtgcgtgttttacagaaggccgctataacaatactagatggaatttcacagtattcactgagactcattgatgctatgatgttcacatctgatttggctactaacaatctagttgtaatggcctacattacaggtggtgttgttcagttgacttcgcagtggctaactaacatctttggcactgtttatgaaaaactcaaacccgtccttgattggcttgaagagaagtttaaggaaggtgtagagtttcttagagacggttgggaaattgttaaatttatctcaacctgtgcttgtgaaattgtcggtggacaaattgtcacctgtgcaaaggaaattaaggagagtgttcagacattctttaagcttgtaaataaatttttggctttgtgtgctgactctatcattattggtggagctaaacttaaagccttgaatttaggtgaaacatttgtcacgcactcaaagggattgtacagaaagtgtgttaaatccagagaagaaactggcctactcatgcctctaaaagccccaaaagaaattatcttcttagagggagaaacacttcccacagaagtgttaacagaggaagttgtcttgaaaactggtgatttacaaccattagaacaacctactagtgaagctgttgaagctccattggttggtacaccagtttgtattaacgggcttatgttgctcgaaatcaaagacacagaaaagtactgtgcccttgcacctaatatgatggtaacaaacaataccttcacactcaaaggcggtgcaccaacaaaggttacttttggtgatgacactgtgatagaagtgcaaggttacaagagtgtgaatatcacttttgaacttgatgaaaggattgataaagtacttaatgagaagtgctctgcctatacagttgaactcggtacagaagtaaatgagttcgcctgtgttgtggcagatgctgtcataaaaactttgcaaccagtatctgaattacttacaccactgggcattgatttagatgagtggagtatggctacatactacttatttgatgagtctggtgagtttaaattggcttcacatatgtattgttctttttaccctccagatgaggatgaagaagaaggtgattgtgaagaagaagagtttgagccatcaactcaatatgagtatggtactgaagatgattaccaaggtaaacctttggaatttggtgccacttctgctgctcttcaacctgaagaagagcaagaagaagattggttagatgatgatagtcaacaaactgttggtcaacaagacggcagtgaggacaatcagacaactactattcaaacaattgttgaggttcaacctcaattagagatggaacttacaccagttgttcagactattgaagtgaatagttttagtggttatttaaaacttactgacaatgtatacattaaaaatgcagacattgtggaagaagctaaaaaggtaaaaccaacagtggttgttaatgcagccaatgtttaccttaaacatggaggaggtgttgcaggagccttaaataaggctactaacaatgccatgcaagttgaatctgatgattacatagctactaatggaccacttaaagtgggtggtagttgtgttttaagcggacacaatcttgctaaacactgtcttcatgttgtcggcccaaatgttaacaaaggtgaagacattcaacttcttaagagtgcttatgaaaattttaatcagcacgaagttctacttgcaccattattatcagctggtatttttggtgctgaccctatacattctttaagagtttgtgtagatactgttcgcacaaatgtctacttagctgtctttgataaaaatctctatgacaaacttgtttcaagctttttggaaatgaagagtgaaaagcaagttgaacaaaagatcgctgagattcctaaagaggaagttaagccatttataactgaaagtaaaccttcagttgaacagagaaaacaagatgataagaaaatcaaagcttgtgttgaagaagttacaacaactctggaagaaactaagttcctcacagaaaacttgttactttatattgacattaatggcaatcttcatccagattctgccactcttgttagtgacattgacatcactttcttaaagaaagatgctccatatatagtgggtgatgttgttcaagagggtgttttaactgctgtggttatacctactaaaaaggctggtggcactactgaaatgctagcgaaagctttgagaaaagtgccaacagacaattatataaccacttacccgggtcagggtttaaatggttacactgtagaggaggcaaagacagtgcttaaaaagtgtaaaagtgccttttacattctaccatctattatctctaatgagaagcaagaaattcttggaactgtttcttggaatttgcgagaaatgcttgcacatgcagaagaaacacgcaaattaatgcctgtctgtgtggaaactaaagccatagtttcaactatacagcgtaaatataagggtattaaaatacaagagggtgtggttgattatggtgctagattttacttttacaccagtaaaacaactgtagcgtcacttatcaacacacttaacgatctaaatgaaactcttgttacaatgccacttggctatgtaacacatggcttaaatttggaagaagctgctcggtatatgagatctctcaaagtgccagctacagtttctgtttcttcacctgatgctgttacagcgtataatggttatcttacttcttcttctaaaacacctgaagaacattttattgaaaccatctcacttgctggttcctataaagattggtcctattctggacaatctacacaactaggtatagaatttcttaagagaggtgataaaagtgtatattacactagtaatcctaccacattccacctagatggtgaagttatcacctttgacaatcttaagacacttctttctttgagagaagtgaggactattaaggtgtttacaacagtagacaacattaacctccacacgcaagttgtggacatgtcaatgacatatggacaacagtttggtccaacttatttggatggagctgatgttactaaaataaaacctcataattcacatgaaggtaaaacattttatgttttacctaatgatgacactctacgtgttgaggcttttgagtactaccacacaactgatcctagttttctgggtaggtacatgtcagcattaaatcacactaaaaagtggaaatacccacaagttaatggtttaacttctattaaatgggcagataacaactgttatcttgccactgcattgttaacactccaacaaatagagttgaagtttaatccacctgctctacaagatgcttattacagagcaagggctggtgaagctgctaacttttgtgcacttatcttagcctactgtaataagacagtaggtgagttaggtgatgttagagaaacaatgagttacttgtttcaacatgccaatttagattcttgcaaaagagtcttgaacgtggtgtgtaaaacttgtggacaacagcagacaacccttaagggtgtagaagctgttatgtacatgggcacactttcttatgaacaatttaagaaaggtgttcagataccttgtacgtgtggtaaacaagctacaaaatatctagtacaacaggagtcaccttttgttatgatgtcagcaccacctgctcagtatgaacttaagcatggtacatttacttgtgctagtgagtacactggtaattaccagtgtggtcactataaacatataacttctaaagaaactttgtattgcatagacggtgctttacttacaaagtcctcagaatacaaaggtcctattacggatgttttctacaaagaaaacagttacacaacaaccataaaaccagttacttataaattggatggtgttgtttgtacagaaattgaccctaagttggacaattattataagaaagacaattcttatttcacagagcaaccaattgatcttgtaccaaaccaaccatatccaaacgcaagcttcgataattttaagtttgtatgtgataatatcaaatttgctgatgatttaaaccagttaactggttataagaaacctgcttcaagagagcttaaagttacatttttccctgacttaaatggtgatgtggtggctattgattataaacactacacaccctcttttaagaaaggagctaaattgttacataaacctattgtttggcatgttaacaatgcaactaataaagccacgtataaaccaaatacctggtgtatacgttgtctttggagcacaaaaccagttgaaacatcaaattcgtttgatgtactgaagtcagaggacgcgcagggaatggataatcttgcctgcgaagatctaaaaccagtctctgaagaagtagtggaaaatcctaccatacagaaagacgttcttgagtgtaatgtgaaaactaccgaagttgtaggagacattatacttaaaccagcaaataatagtttaaaaattacagaagaggttggccacacagatctaatggctgcttatgtagacaattctagtcttactattaagaaacctaatgaattatctagagtattaggtttgaaaacccttgctactcatggtttagctgctgttaatagtgtcccttgggatactatagctaattatgctaagccttttcttaacaaagttgttagtacaactactaacatagttacacggtgtttaaaccgtgtttgtactaattatatgccttatttctttactttattgctacaattgtgtacttttactagaagtacaaattctagaattaaagcatctatgccgactactatagcaaagaatactgttaagagtgtcggtaaattttgtctagaggcttcatttaattatttgaagtcacctaatttttctaaactgataaatattataatttggtttttactattaagtgtttgcctaggttctttaatctactcaaccgctgctttaggtgttttaatgtctaatttaggcatgccttcttactgtactggttacagagaaggctatttgaactctactaatgtcactattgcaacctactgtactggttctataccttgtagtgtttgtcttagtggtttagattctttagacacctatccttctttagaaactatacaaattaccatttcatcttttaaatgggatttaactgcttttggcttagttgcagagtggtttttggcatatattcttttcactaggtttttctatgtacttggattggctgcaatcatgcaattgtttttcagctattttgcagtacattttattagtaattcttggcttatgtggttaataattaatcttgtacaaatggccccgatttcagctatggttagaatgtacatcttctttgcatcattttattatgtatggaaaagttatgtgcatgttgtagacggttgtaattcatcaacttgtatgatgtgttacaaacgtaatagagcaacaagagtcgaatgtacaactattgttaatggtgttagaaggtccttttatgtctatgctaatggaggtaaaggcttttgcaaactacacaattggaattgtgttaattgtgatacattctgtgctggtagtacatttattagtgatgaagttgcgagagacttgtcactacagtttaaaagaccaataaatcctactgaccagtcttcttacatcgttgatagtgttacagtgaagaatggttccatccatctttactttgataaagctggtcaaaagacttatgaaagacattctctctctcattttgttaacttagacaacctgagagctaataacactaaaggttcattgcctattaatgttatagtttttgatggtaaatcaaaatgtgaagaatcatctgcaaaatcagcgtctgtttactacagtcagcttatgtgtcaacctatactgttactagatcaggcattagtgtctgatgttggtgatagtgcggaagttgcagttaaaatgtttgatgcttacgttaatacgttttcatcaacttttaacgtaccaatggaaaaactcaaaacactagttgcaactgcagaagctgaacttgcaaagaatgtgtccttagacaatgtcttatctacttttatttcagcagctcggcaagggtttgttgattcagatgtagaaactaaagatgttgttgaatgtcttaaattgtcacatcaatctgacatagaagttactggcgatagttgtaataactatatgctcacctataacaaagttgaaaacatgacaccccgtgaccttggtgcttgtattgactgtagtgcgcgtcatattaatgcgcaggtagcaaaaagtcacaacattgctttgatatggaacgttaaagatttcatgtcattgtctgaacaactacgaaaacaaatacgtagtgctgctaaaaagaataacttaccttttaagttgacatgtgcaactactagacaagttgttaatgttgtaacaacaaagatagcacttaagggtggtaaaattgttaataattggttgaagcagttaattaaagttacacttgtgttcctttttgttgctgctattttctatttaataacacctgttcatgtcatgtctaaacatactgacttttcaagtgaaatcataggatacaaggctattgatggtggtgtcactcgtgacatagcatctacagatacttgttttgctaacaaacatgctgattttgacacatggtttagccagcgtggtggtagttatactaatgacaaagcttgcccattgattgctgcagtcataacaagagaagtgggttttgtcgtgcctggtttgcctggcacgatattacgcacaactaatggtgactttttgcatttcttacctagagtttttagtgcagttggtaacatctgttacacaccatcaaaacttatagagtacactgactttgcaacatcagcttgtgttttggctgctgaatgtacaatttttaaagatgcttctggtaagccagtaccatattgttatgataccaatgtactagaaggttctgttgcttatgaaagtttacgccctgacacacgttatgtgctcatggatggctctattattcaatttcctaacacctaccttgaaggttctgttagagtggtaacaacttttgattctgagtactgtaggcacggcacttgtgaaagatcagaagctggtgtttgtgtatctactagtggtagatgggtacttaacaatgattattacagatctttaccaggagttttctgtggtgtagatgctgtaaatttacttactaatatgtttacaccactaattcaacctattggtgctttggacatatcagcatctatagtagctggtggtattgtagctatcgtagtaacatgccttgcctactattttatgaggtttagaagagcttttggtgaatacagtcatgtagttgcctttaatactttactattccttatgtcattcactgtactctgtttaacaccagtttactcattcttacctggtgtttattctgttatttacttgtacttgacattttatcttactaatgatgtttcttttttagcacatattcagtggatggttatgttcacacctttagtacctttctggataacaattgcttatatcatttgtatttccacaaagcatttctattggttctttagtaattacctaaagagacgtgtagtctttaatggtgtttcctttagtacttttgaagaagctgcgctgtgcacctttttgttaaataaagaaatgtatctaaagttgcgtagtgatgtgctattacctcttacgcaatataatagatacttagctctttataataagtacaagtattttagtggagcaatggatacaactagctacagagaagctgcttgttgtcatctcgcaaaggctctcaatgacttcagtaactcaggttctgatgttctttaccaaccaccacaaacctctatcacctcagctgttttgcagagtggttttagaaaaatggcattcccatctggtaaagttgagggttgtatggtacaagtaacttgtggtacaactacacttaacggtctttggcttgatgacgtagtttactgtccaagacatgtgatctgcacctctgaagacatgcttaaccctaattatgaagatttactcattcgtaagtctaatcataatttcttggtacaggctggtaatgttcaactcagggttattggacattctatgcaaaattgtgtacttaagcttaaggttgatacagccaatcctaagacacctaagtataagtttgttcgcattcaaccaggacagactttttcagtgttagcttgttacaatggttcaccatctggtgtttaccaatgtgctatgaggcccaatttcactattaagggttcattccttaatggttcatgtggtagtgttggttttaacatagattatgactgtgtctctttttgttacatgcaccatatggaattaccaactggagttcatgctggcacagacttagaaggtaacttttatggaccttttgttgacaggcaaacagcacaagcagctggtacggacacaactattacagttaatgttttagcttggttgtacgctgctgttataaatggagacaggtggtttctcaatcgatttaccacaactcttaatgactttaaccttgtggctatgaagtacaattatgaacctctaacacaagaccatgttgacatactaggacctctttctgctcaaactggaattgccgttttagatatgtgtgcttcattaaaagaattactgcaaaatggtatgaatggacgtaccatattgggtagtgctttattagaagatgaatttacaccttttgatgttgttagacaatgctcaggtgttactttccaaagtgcagtgaaaagaacaatcaagggtacacaccactggttgttactcacaattttgacttcacttttagttttagtccagagtactcaatggtctttgttcttttttttgtatgaaaatgcctttttaccttttgctatgggtattattgctatgtctgcttttgcaatgatgtttgtcaaacataagcatgcatttctctgtttgtttttgttaccttctcttgccactgtagcttattttaatatggtctatatgcctgctagttgggtgatgcgtattatgacatggttggatatggttgatactagtttgtctggttttaagctaaaagactgtgttatgtatgcatcagctgtagtgttactaatccttatgacagcaagaactgtgtatgatgatggtgctaggagagtgtggacacttatgaatgtcttgacactcgtttataaagtttattatggtaatgctttagatcaagccatttccatgtgggctcttataatctctgttacttctaactactcaggtgtagttacaactgtcatgtttttggccagaggtattgtttttatgtgtgttgagtattgccctattttcttcataactggtaatacacttcagtgtataatgctagtttattgtttcttaggctatttttgtacttgttactttggcctcttttgtttactcaaccgctactttagactgactcttggtgtttatgattacttagtttctacacaggagtttagatatatgaattcacagggactactcccacccaagaatagcatagatgccttcaaactcaacattaaattgttgggtgttggtggcaaaccttgtatcaaagtagccactgtacagtctaaaatgtcagatgtaaagtgcacatcagtagtcttactctcagttttgcaacaactcagagtagaatcatcatctaaattgtgggctcaatgtgtccagttacacaatgacattctcttagctaaagatactactgaagcctttgaaaaaatggtttcactactttctgttttgctttccatgcagggtgctgtagacataaacaagctttgtgaagaaatgctggacaacagggcaaccttacaagctatagcctcagagtttagttcccttccatcatatgcagcttttgctactgctcaagaagcttatgagcaggctgttgctaatggtgattctgaagttgttcttaaaaagttgaagaagtctttgaatgtggctaaatctgaatttgaccgtgatgcagccatgcaacgtaagttggaaaagatggctgatcaagctatgacccaaatgtataaacaggctagatctgaggacaagagggcaaaagttactagtgctatgcagacaatgcttttcactatgcttagaaagttggataatgatgcactcaacaacattatcaacaatgcaagagatggttgtgttcccttgaacataatacctcttacaacagcagccaaactaatggttgtcataccagactataacacatataaaaatacgtgtgatggtacaacatttacttatgcatcagcattgtgggaaatccaacaggttgtagatgcagatagtaaaattgttcaacttagtgaaattagtatggacaattcacctaatttagcatggcctcttattgtaacagctttaagggccaattctgctgtcaaattacagaataatgagcttagtcctgttgcactacgacagatgtcttgtgctgccggtactacacaaactgcttgcactgatgacaatgcgttagcttactacaacacaacaaagggaggtaggtttgtacttgcactgttatccgatttacaggatttgaaatgggctagattccctaagagtgatggaactggtactatctatacagaactggaaccaccttgtaggtttgttacagacacacctaaaggtcctaaagtgaagtatttatactttattaaaggattaaacaacctaaatagaggtatggtacttggtagtttagctgccacagtacgtctacaagctggtaatgcaacagaagtgcctgccaattcaactgtattatctttctgtgcttttgctgtagatgctgctaaagcttacaaagattatctagctagtgggggacaaccaatcactaattgtgttaagatgttgtgtacacacactggtactggtcaggcaataacagttacaccggaagccaatatggatcaagaatcctttggtggtgcatcgtgttgtctgtactgccgttgccacatagatcatccaaatcctaaaggattttgtgacttaaaaggtaagtatgtacaaatacctacaacttgtgctaatgaccctgtgggttttacacttaaaaacacagtctgtaccgtctgcggtatgtggaaaggttatggctgtagttgtgatcaactccgcgaacccatgcttcagtcagctgatgcacaatcgtttttaaaccgggtttgcggtgtaagtgcagcccgtcttacaccgtgcggcacaggcactagtactgatgtcgtatacagggcttttgacatctacaatgataaagtagctggttttgctaaattcctaaaaactaattgttgtcgcttccaagaaaaggatgaagatgacaatttaattgattcttactttgtagttaagagacacactttctctaactaccaacatgaagaaacaatttataatttacttaaggattgtccagctgttgctaaacatgacttctttaagtttagaatagacggtgacatggtaccacatatatcacgtcaacgtcttactaaatacacaatggcagacctcgtctatgctttaaggcattttgatgaaggtaattgtgacacattaaaagaaatacttgtcacatacaattgttgtgatgatgattatttcaataaaaaggactggtatgattttgtagaaaacccagatatattacgcgtatacgccaacttaggtgaacgtgtacgccaagctttgttaaaaacagtacaattctgtgatgccatgcgaaatgctggtattgttggtgtactgacattagataatcaagatctcaatggtaactggtatgatttcggtgatttcatacaaaccacgccaggtagtggagttcctgttgtagattcttattattcattgttaatgcctatattaaccttgaccagggctttaactgcagagtcacatgttgacactgacttaacaaagccttacattaagtgggatttgttaaaatatgacttcacggaagagaggttaaaactctttgaccgttattttaaatattgggatcagacataccacccaaattgtgttaactgtttggatgacagatgcattctgcattgtgcaaactttaatgttttattctctacagtgttcccacttacaagttttggaccactagtgagaaaaatatttgttgatggtgttccatttgtagtttcaactggataccacttcagagagctaggtgttgtacataatcaggatgtaaacttacatagctctagacttagttttaaggaattacttgtgtatgctgctgaccctgctatgcacgctgcttctggtaatctattactagataaacgcactacgtgcttttcagtagctgcacttactaacaatgttgcttttcaaactgtcaaacccggtaattttaacaaagacttctatgactttgctgtgtctaagggtttctttaaggaaggaagttctgttgaattaaaacacttcttctttgctcaggatggtaatgctgctatcagcgattatgactactatcgttataatctaccaacaatgtgtgatatcagacaactactatttgtagttgaagttgttgataagtactttgattgttacgatggtggctgtattaatgctaaccaagtcatcgtcaacaacctagacaaatcagctggttttccatttaataaatggggtaaggctagactttattatgattcaatgagttatgaggatcaagatgcacttttcgcatatacaaaacgtaatgtcatccctactataactcaaatgaatcttaagtatgccattagtgcaaagaatagagctcgcaccgtagctggtgtctctatctgtagtactatgaccaatagacagtttcatcaaaaattattgaaatcaatagccgccactagaggagctactgtagtaattggaacaagcaaattctatggtggttggcacaacatgttaaaaactgtttatagtgatgtagaaaaccctcaccttatgggttgggattatcctaaatgtgatagagccatgcctaacatgcttagaattatggcctcacttgttcttgctcgcaaacatacaacgtgttgtagcttgtcacaccgtttctatagattagctaatgagtgtgctcaagtattgagtgaaatggtcatgtgtggcggttcactatatgttaaaccaggtggaacctcatcaggagatgccacaactgcttatgctaatagtgtttttaacatttgtcaagctgtcacggccaatgttaatgcacttttatctactgatggtaacaaaattgccgataagtatgtccgcaatttacaacacagactttatgagtgtctctatagaaatagagatgttgacacagactttgtgaatgagttttacgcatatttgcgtaaacatttctcaatgatgatactctctgacgatgctgttgtgtgtttcaatagcacttatgcatctcaaggtctagtggctagcataaagaactttaagtcagttctttattatcaaaacaatgtttttatgtctgaagcaaaatgttggactgagactgaccttactaaaggacctcatgaattttgctctcaacatacaatgctagttaaacagggtgatgattatgtgtaccttccttacccagatccatcaagaatcctaggggccggctgttttgtagatgatatcgtaaaaacagatggtacacttatgattgaacggttcgtgtctttagctatagatgcttacccacttactaaacatcctaatcaggagtatgctgatgtctttcatttgtacttacaatacataagaaagctacatgatgagttaacaggacacatgttagacatgtattctgttatgcttactaatgataacacttcaaggtattgggaacctgagttttatgaggctatgtacacaccgcatacagtcttacaggctgttggggcttgtgttctttgcaattcacagacttcattaagatgtggtgcttgcatacgtagaccattcttatgttgtaaatgctgttacgaccatgtcatatcaacatcacataaattagtcttgtctgttaatccgtatgtttgcaatgctccaggttgtgatgtcacagatgtgactcaactttacttaggaggtatgagctattattgtaaatcacataaaccacccattagttttccattgtgtgctaatggacaagtttttggtttatataaaaatacatgtgttggtagcgataatgttactgactttaatgcaattgcaacatgtgactggacaaatgctggtgattacattttagctaacacctgtactgaaagactcaagctttttgcagcagaaacgctcaaagctactgaggagacatttaaactgtcttatggtattgctactgtacgtgaagtgctgtctgacagagaattacatctttcatgggaagttggtaaacctagaccaccacttaaccgaaattatgtctttactggttatcgtgtaactaaaaacagtaaagtacaaataggagagtacacctttgaaaaaggtgactatggtgatgctgttgtttaccgaggtacaacaacttacaaattaaatgttggtgattattttgtgctgacatcacatacagtaatgccattaagtgcacctacactagtgccacaagagcactatgttagaattactggcttatacccaacactcaatatctcagatgagttttctagcaatgttgcaaattatcaaaaggttggtatgcaaaagtattctacactccagggaccacctggtactggtaagagtcattttgctattggcctagctctctactacccttctgctcgcatagtgtatacagcttgctctcatgccgctgttgatgcactatgtgagaaggcattaaaatatttgcctatagataaatgtagtagaattatacctgcacgtgctcgtgtagagtgttttgataaattcaaagtgaattcaacattagaacagtatgtcttttgtactgtaaatgcattgcctgagacgacagcagatatagttgtctttgatgaaatttcaatggccacaaattatgatttgagtgttgtcaatgccagattacgtgctaagcactatgtgtacattggcgaccctgctcaattacctgcaccacgcacattgctaactaagggcacactagaaccagaatatttcaattcagtgtgtagacttatgaaaactataggtccagacatgttcctcggaacttgtcggcgttgtcctgctgaaattgttgacactgtgagtgctttggtttatgataataagcttaaagcacataaagacaaatcagctcaatgctttaaaatgttttataagggtgttatcacgcatgatgtttcatctgcaattaacaggccacaaataggcgtggtaagagaattccttacacgtaaccctgcttggagaaaagctgtctttatttcaccttataattcacagaatgctgtagcctcaaagattttgggactaccaactcaaactgttgattcatcacagggctcagaatatgactatgtcatattcactcaaaccactgaaacagctcactcttgtaatgtaaacagatttaatgttgctattaccagagcaaaagtaggcatactttgcataatgtctgatagagacctttatgacaagttgcaatttacaagtcttgaaattccacgtaggaatgtggcaactttacaagctgaaaatgtaacaggactctttaaagattgtagtaaggtaatcactgggttacatcctacacaggcacctacacacctcagtgttgacactaaattcaaaactgaaggtttatgtgttgacatacctggcatacctaaggacatgacctatagaagactcatctctatgatgggttttaaaatgaattatcaagttaatggttaccctaacatgtttatcacccgcgaagaagctataagacatgtacgtgcatggattggcttcgatgtcgaggggtgtcatgctactagagaagctgttggtaccaatttacctttacagctaggtttttctacaggtgttaacctagttgctgtacctacaggttatgttgatacacctaataatacagatttttccagagttagtgctaaaccaccgcctggagatcaatttaaacacctcataccacttatgtacaaaggacttccttggaatgtagtgcgtataaagattgtacaaatgttaagtgacacacttaaaaatctctctgacagagtcgtatttgtcttatgggcacatggctttgagttgacatctatgaagtattttgtgaaaataggacctgagcgcacctgttgtctatgtgatagacgtgccacatgcttttccactgcttcagacacttatgcctgttggcatcattctattggatttgattacgtctataatccgtttatgattgatgttcaacaatggggttttacaggtaacctacaaagcaaccatgatctgtattgtcaagtccatggtaatgcacatgtagctagttgtgatgcaatcatgactaggtgtctagctgtccacgagtgctttgttaagcgtgttgactggactattgaatatcctataattggtgatgaactgaagattaatgcggcttgtagaaaggttcaacacatggttgttaaagctgcattattagcagacaaattcccagttcttcacgacattggtaaccctaaagctattaagtgtgtacctcaagctgatgtagaatggaagttctatgatgcacagccttgtagtgacaaagcttataaaatagaagaattattctattcttatgccacacattctgacaaattcacagatggtgtatgcctattttggaattgcaatgtcgatagatatcctgctaattccattgtttgtagatttgacactagagtgctatctaaccttaacttgcctggttgtgatggtggcagtttgtatgtaaataaacatgcattccacacaccagcttttgataaaagtgcttttgttaatttaaaacaattaccatttttctattactctgacagtccatgtgagtctcatggaaaacaagtagtgtcagatatagattatgtaccactaaagtctgctacgtgtataacacgttgcaatttaggtggtgctgtctgtagacatcatgctaatgagtacagattgtatctcgatgcttataacatgatgatctcagctggctttagcttgtgggtttacaaacaatttgatacttataacctctggaacacttttacaagacttcagagtttagaaaatgtggcttttaatgttgtaaataagggacactttgatggacaacagggtgaagtaccagtttctatcattaataacactgtttacacaaaagttgatggtgttgatgtagaattgtttgaaaataaaacaacattacctgttaatgtagcatttgagctttgggctaagcgcaacattaaaccagtaccagaggtgaaaatactcaataatttgggtgtggacattgctgctaatactgtgatctgggactacaaaagagatgctccagcacatatatctactattggtgtttgttctatgactgacatagccaagaaaccaactgaaacgatttgtgcaccactcactgtcttttttgatggtagagttgatggtcaagtagacttatttagaaatgcccgtaatggtgttcttattacagaaggtagtgttaaaggtttacaaccatctgtaggtcccaaacaagctagtcttaatggagtcacattaattggagaagccgtaaaaacacagttcaattattataagaaagttgatggtgttgtccaacaattacctgaaacttactttactcagagtagaaatttacaagaatttaaacccaggagtcaaatggaaattgatttcttagaattagctatggatgaattcattgaacggtataaattagaaggctatgccttcgaacatatcgtttatggagattttagtcatagtcagttaggtggtttacatctactgattggactagctaaacgttttaaggaatcaccttttgaattagaagattttattcctatggacagtacagttaaaaactatttcataacagatgcgcaaacaggttcatctaagtgtgtgtgttctgttattgatttattacttgatgattttgttgaaataataaaatcccaagatttatctgtagtttctaaggttgtcaaagtgactattgactatacagaaatttcatttatgctttggtgtaaagatggccatgtagaaacattttacccaaaattacaatctagtcaagcgtggcaaccgggtgttgctatgcctaatctttacaaaatgcaaagaatgctattagaaaagtgtgaccttcaaaattatggtgatagtgcaacattacctaaaggcataatgatgaatgtcgcaaaatatactcaactgtgtcaatatttaaacacattaacattagctgtaccctataatatgagagttatacattttggtgctggttctgataaaggagttgcaccaggtacagctgttttaagacagtggttgcctacgggtacgctgcttgtcgattcagatcttaatgactttgtctctgatgcagattcaactttgattggtgattgtgcaactgtacatacagctaataaatgggatctcattattagtgatatgtacgaccctaagactaaaaatgttacaaaagaaaatgactctaaagagggttttttcacttacatttgtgggtttatacaacaaaagctagctcttggaggttccgtggctataaagataacagaacattcttggaatgctgatctttataagctcatgggacacttcgcatggtggacagcctttgttactaatgtgaatgcgtcatcatctgaagcatttttaattggatgtaattatcttggcaaaccacgcgaacaaatagatggttatgtcatgcatgcaaattacatattttggaggaatacaaatccaattcagttgtcttcctattctttatttgacatgagtaaatttccccttaaattaaggggtactgctgttatgtctttaaaagaaggtcaaatcaatgatatgattttatctcttcttagtaaaggtagacttataattagagaaaacaacagagttgttatttctagtgatgttcttgttaacaactaa

SEQ ID NO: 68 - protein, 7096 aa, Severe acute respiratory syndrome coronavirus 2
MESLVPGFNEKTHVQLSLPVLQVRDVLVRGFGDSVEEVLSEARQHLKDGTCGLVEVEKGVLPQLEQPYVFIKRSDARTAPHGHVMVELVAELEGIQYGRSGETLGVLVPHVGEIPVAYRKVLLRKNGNKGAGGHSYGADLKSFDLGDELGTDPYEDFQENWNTKHSSGVTRELMRELNGGAYTRYVDNNFCGPDGYPLECIKDLLARAGKASCTLSEQLDFIDTKRGVYCCREHEHEIAWYTERSEKSYELQTPFEIKLAKKFDTFNGECPNFVFPLNSIIKTIQPRVEKKKLDGFMGRIRSVYPVASPNECNQMCLSTLMKCDHCGETSWQTGDFVKATCEFCGTENLTKEGATTCGYLPQNAVVKIYCPACHNSEVGPEHSLAEYHNESGLKTILRKGGRTIAFGGCVFSYVGCHNKCAYWVPRASANIGCNHTGVVGEGSEGLNDNLLEILQKEKVNINIVGDFKLNEEIAIILASFSASTSAFVETVKGLDYKAFKQIVESCGNFKVTKGKAKKGAWNIGEQKSILSPLYAFASEAARVVRSIFSRTLETAQNSVRVLQKAAITILDGISQYSLRLIDAMMFTSDLATNNLVVMAYITGGVVQLTSQWLTNIFGTVYEKLKPVLDWLEEKFKEGVEFLRDGWEIVKFISTCACEIVGGQIVTCAKEIKESVQTFFKLVNKFLALCADSIIIGGAKLKALNLGETFVTHSKGLYRKCVKSREETGLLMPLKAPKEIIFLEGETLPTEVLTEEVVLKTGDLQPLEQPTSEAVEAPLVGTPVCINGLMLLEIKDTEKYCALAPNMMVTNNTFTLKGGAPTKVTFGDDTVIEVQGYKSVNITFELDERIDKVLNEKCSAYTVELGTEVNEFACVVADAVIKTLQPVSELLTPLGIDLDEWSMATYYLFDESGEFKLASHMYCSFYPPDEDEEEGDCEEEEFEPSTQYEYGTEDDYQGKPLEFGATSAALQPEEEQEEDWLDDDSQQTVGQQDGSEDNQTTTIQTIVEVQPQLEMELTPVVQTIEVNSFSGYLKLTDNVYIKNADIVEEAKKVKPTVVVNAANVYLKHGGGVAGALNKATNNAMQVESDDYIATNGPLKVGGSCVLSGHNLAKHCLHVVGPNVNKGEDIQLLKSAYENFNQHEVLLAPLLSAGIFGADPIHSLRVCVDTVRTNVYLAVFDKNLYDKLVSSFLEMKSEKQVEQKIAEIPKEEVKPFITESKPSVEQRKQDDKKIKACVEEVTTTLEETKFLTENLLLYIDINGNLHPDSATLVSDIDITFLKKDAPYIVGDVVQEGVLTAVVIPTKKAGGTTEMLAKALRKVPTDNYITTYPGQGLNGYTVEEAKTVLKKCKSAFYILPSIISNEKQEILGTVSWNLREMLAHAEETRKLMPVCVETKAIVSTIQRKYKGIKIQEGVVDYGARFYFYTSKTTVASLINTLNDLNETLVTMPLGYVTHGLNLEEAARYMRSLKVPATVSVSSPDAVTAYNGYLTSSSKTPEEHFIETISLAGSYKDWSYSGQSTQLGIEFLKRGDKSVYYTSNPTTFHLDGEVITFDNLKTLLSLREVRTIKVFTTVDNINLHTQVVDMSMTYGQQFGPTYLDGADVTKIKPHNSHEGKTFYVLPNDDTLRVEAFEYYHTTDPSFLGRYMSALNHTKKWKYPQVNGLTSIKWADNNCYLATALLTLQQIELKFNPPALQDAYYRARAGEAANFCALILAYCNKTVGELGDVRETMSYLFQHANLDSCKRVLNVVCKTCGQQQTTLKGVEAVMYMGTLSYEQFKKGVQIPCTCGKQATKYLVQQESPFVMMSAPPAQYELKHGTFTCASEYTGNYQCGHYKHITSKETLYCIDGALLTKSSEYKGPITDVFYKENSYTTTIKPVTYKLDGVVCTEIDPKLDNYYKKDNSYFTEQPIDLVPNQPYPNASFDNFKFVCDNIKFADDLNQLTGYKKPASRELKVTFFPDLNGDVVAIDYKHYTPSFKKGAKLLHKPIVWHVNNATNKATYKPNTWCIRCLWSTKPVETSNSFDVLKSEDAQGMDNLACEDLKPVSEEVVENPTIQKDVLECNVKTTEVVGDIILKPANNSLKITEEVGHTDLMAAYVDNSSLTIKKPNELSRVLGLKTLATHGLAAVNSVPWDTIANYAKPFLNKVVSTTTNIVTRCLNRVCTNYMPYFFTLLLQLCTFTRSTNSRIKASMPTTIAKNTVKSVGKFCLEASFNYLKSPNFSKLINIIIWFLLLSVCLGSLIYSTAALGVLMSNLGMPSYCTGYREGYLNSTNVTIATYCTGSIPCSVCLSGLDSLDTYPSLETIQITISSFKWDLTAFGLVAEWFLAYILFTRFFYVLGLAAIMQLFFSYFAVHFISNSWLMWLIINLVQMAPISAMVRMYIFFASFYYVWKSYVHVVDGCNSSTCMMCYKRNRATRVECTTIVNGVRRSFYVYANGGKGFCKLHNWNCVNCDTFCAGSTFISDEVARDLSLQFKRPINPTDQSSYIVDSVTVKNGSIHLYFDKAGQKTYERHSLSHFVNLDNLRANNTKGSLPINVIVFDGKSKCEESSAKSASVYYSQLMCQPILLLDQALVSDVGDSAEVAVKMFDAYVNTFSSTFNVPMEKLKTLVATAEAELAKNVSLDNVLSTFISAARQGFVDSDVETKDVVECLKLSHQSDIEVTGDSCNNYMLTYNKVENMTPRDLGACIDCSARHINAQVAKSHNIALIWNVKDFMSLSEQLRKQIRSAAKKNNLPFKLTCATTRQVVNVVTTKIALKGGKIVNNWLKQLIKVTLVFLFVAAIFYLITPVHVMSKHTDFSSEIIGYKAIDGGVTRDIASTDTCFANKHADFDTWFSQRGGSYTNDKACPLIAAVITREVGFVVPGLPGTILRTTNGDFLHFLPRVFSAVGNICYTPSKLIEYTDFATSACVLAAECTIFKDASGKPVPYCYDTNVLEGSVAYESLRPDTRYVLMDGSIIQFPNTYLEGSVRVVTTFDSEYCRHGTCERSEAGVCVSTSGRWVLNNDYYRSLPGVFCGVDAVNLLTNMFTPLIQPIGALDISASIVAGGIVAIVVTCLAYYFMRFRRAFGEYSHVVAFNTLLFLMSFTVLCLTPVYSFLPGVYSVIYLYLTFYLTNDVSFLAHIQWMVMFTPLVPFWITIAYIICISTKHFYWFFSNYLKRRVVFNGVSFSTFEEAALCTFLLNKEMYLKLRSDVLLPLTQYNRYLALYNKYKYFSGAMDTTSYREAACCHLAKALNDFSNSGSDVLYQPPQTSITSAVLQSGFRKMAFPSGKVEGCMVQVTCGTTTLNGLWLDDVVYCPRHVICTSEDMLNPNYEDLLIRKSNHNFLVQAGNVQLRVIGHSMQNCVLKLKVDTANPKTPKYKFVRIQPGQTFSVLACYNGSPSGVYQCAMRPNFTIKGSFLNGSCGSVGFNIDYDCVSFCYMHHMELPTGVHAGTDLEGNFYGPFVDRQTAQAAGTDTTITVNVLAWLYAAVINGDRWFLNRFTTTLNDFNLVAMKYNYEPLTQDHVDILGPLSAQTGIAVLDMCASLKELLQNGMNGRTILGSALLEDEFTPFDVVRQCSGVTFQSAVKRTIKGTHHWLLLTILTSLLVLVQSTQWSLFFFLYENAFLPFAMGIIAMSAFAMMFVKHKHAFLCLFLLPSLATVAYFNMVYMPASWVMRIMTWLDMVDTSLSGFKLKDCVMYASAVVLLILMTARTVYDDGARRVWTLMNVLTLVYKVYYGNALDQAISMWALIISVTSNYSGVVTTVMFLARGIVFMCVEYCPIFFITGNTLQCIMLVYCFLGYFCTCYFGLFCLLNRYFRLTLGVYDYLVSTQEFRYMNSQGLLPPKNSIDAFKLNIKLLGVGGKPCIKVATVQSKMSDVKCTSVVLLSVLQQLRVESSSKLWAQCVQLHNDILLAKDTTEAFEKMVSLLSVLLSMQGAVDINKLCEEMLDNRATLQAIASEFSSLPSYAAFATAQEAYEQAVANGDSEVVLKKLKKSLNVAKSEFDRDAAMQRKLEKMADQAMTQMYKQARSEDKRAKVTSAMQTMLFTMLRKLDNDALNNIINNARDGCVPLNIIPLTTAAKLMVVIPDYNTYKNTCDGTTFTYASALWEIQQVVDADSKIVQLSEISMDNSPNLAWPLIVTALRANSAVKLQNNELSPVALRQMSCAAGTTQTACTDDNALAYYNTTKGGRFVLALLSDLQDLKWARFPKSDGTGTIYTELEPPCRFVTDTPKGPKVKYLYFIKGLNNLNRGMVLGSLAATVRLQAGNATEVPANSTVLSFCAFAVDAAKAYKDYLASGGQPITNCVKMLCTHTGTGQAITVTPEANMDQESFGGASCCLYCRCHIDHPNPKGFCDLKGKYVQIPTTCANDPVGFTLKNTVCTVCGMWKGYGCSCDQLREPMLQSADAQSFLNRVCGVSAARLTPCGTGTSTDVVYRAFDIYNDKVAGFAKFLKTNCCRFQEKDEDDNLIDSYFVVKRHTFSNYQHEETIYNLLKDCPAVAKHDFFKFRIDGDMVPHISRQRLTKYTMADLVYALRHFDEGNCDTLKEILVTYNCCDDDYFNKKDWYDFVENPDILRVYANLGERVRQALLKTVQFCDAMRNAGIVGVLTLDNQDLNGNWYDFGDFIQTTPGSGVPVVDSYYSLLMPILTLTRALTAESHVDTDLTKPYIKWDLLKYDFTEERLKLFDRYFKYWDQTYHPNCVNCLDDRCILHCANFNVLFSTVFPLTSFGPLVRKIFVDGVPFVVSTGYHFRELGVVHNQDVNLHSSRLSFKELLVYAADPAMHAASGNLLLDKRTTCFSVAALTNNVAFQTVKPGNFNKDFYDFAVSKGFFKEGSSVELKHFFFAQDGNAAISDYDYYRYNLPTMCDIRQLLFVVEVVDKYFDCYDGGCINANQVIVNNLDKSAGFPFNKWGKARLYYDSMSYEDQDALFAYTKRNVIPTITQMNLKYAISAKNRARTVAGVSICSTMTNRQFHQKLLKSIAATRGATVVIGTSKFYGGWHNMLKTVYSDVENPHLMGWDYPKCDRAMPNMLRIMASLVLARKHTTCCSLSHRFYRLANECAQVLSEMVMCGGSLYVKPGGTSSGDATTAYANSVFNICQAVTANVNALLSTDGNKIADKYVRNLQHRLYECLYRNRDVDTDFVNEFYAYLRKHFSMMILSDDAVVCFNSTYASQGLVASIKNFKSVLYYQNNVFMSEAKCWTETDLTKGPHEFCSQHTMLVKQGDDYVYLPYPDPSRILGAGCFVDDIVKTDGTLMIERFVSLAIDAYPLTKHPNQEYADVFHLYLQYIRKLHDELTGHMLDMYSVMLTNDNTSRYWEPEFYEAMYTPHTVLQAVGACVLCNSQTSLRCGACIRRPFLCCKCCYDHVISTSHKLVLSVNPYVCNAPGCDVTDVTQLYLGGMSYYCKSHKPPISFPLCANGQVFGLYKNTCVGSDNVTDFNAIATCDWTNAGDYILANTCTERLKLFAAETLKATEETFKLSYGIATVREVLSDRELHLSWEVGKPRPPLNRNYVFTGYRVTKNSKVQIGEYTFEKGDYGDAVVYRGTTTYKLNVGDYFVLTSHTVMPLSAPTLVPQEHYVRITGLYPTLNISDEFSSNVANYQKVGMQKYSTLQGPPGTGKSHFAIGLALYYPSARIVYTACSHAAVDALCEKALKYLPIDKCSRIIPARARVECFDKFKVNSTLEQYVFCTVNALPETTADIVVFDEISMATNYDLSVVNARLRAKHYVYIGDPAQLPAPRTLLTKGTLEPEYFNSVCRLMKTIGPDMFLGTCRRCPAEIVDTVSALVYDNKLKAHKDKSAQCFKMFYKGVITHDVSSAINRPQIGVVREFLTRNPAWRKAVFISPYNSQNAVASKILGLPTQTVDSSQGSEYDYVIFTQTTETAHSCNVNRFNVAITRAKVGILCIMSDRDLYDKLQFTSLEIPRRNVATLQAENVTGLFKDCSKVITGLHPTQAPTHLSVDTKFKTEGLCVDIPGIPKDMTYRRLISMMGFKMNYQVNGYPNMFITREEAIRHVRAWIGFDVEGCHATREAVGTNLPLQLGFSTGVNLVAVPTGYVDTPNNTDFSRVSAKPPPGDQFKHLIPLMYKGLPWNVVRIKIVQMLSDTLKNLSDRVVFVLWAHGFELTSMKYFVKIGPERTCCLCDRRATCFSTASDTYACWHHSIGFDYVYNPFMIDVQQWGFTGNLQSNHDLYCQVHGNAHVASCDAIMTRCLAVHECFVKRVDWTIEYPIIGDELKINAACRKVQHMVVKAALLADKFPVLHDIGNPKAIKCVPQADVEWKFYDAQPCSDKAYKIEELFYSYATHSDKFTDGVCLFWNCNVDRYPANSIVCRFDTRVLSNLNLPGCDGGSLYVNKHAFHTPAFDKSAFVNLKQLPFFYYSDSPCESHGKQVVSDIDYVPLKSATCITRCNLGGAVCRHHANEYRLYLDAYNMMISAGFSLWVYKQFDTYNLWNTFTRLQSLENVAFNVVNKGHFDGQQGEVPVSIINNTVYTKVDGVDVELFENKTTLPVNVAFELWAKRNIKPVPEVKILNNLGVDIAANTVIWDYKRDAPAHISTIGVCSMTDIAKKPTETICAPLTVFFDGRVDGQVDLFRNARNGVLITEGSVKGLQPSVGPKQASLNGVTLIGEAVKTQFNYYKKVDGVVQQLPETYFTQSRNLQEFKPRSQMEIDFLELAMDEFIERYKLEGYAFEHIVYGDFSHSQLGGLHLLIGLAKRFKESPFELEDFIPMDSTVKNYFITDAQTGSSKCVCSVIDLLLDDFVEIIKSQDLSVVSKVVKVTIDYTEISFMLWCKDGHVETFYPKLQSSQAWQPGVAMPNLYKMQRMLLEKCDLQNYGDSATLPKGIMMNVAKYTQLCQYLNTLTLAVPYNMRVIHFGAGSDKGVAPGTAVLRQWLPTGTLLVDSDLNDFVSDADSTLIGDCATVHTANKWDLIISDMYDPKTKNVTKENDSKEGFFTYICGFIQQKLALGGSVAIKITEHSWNADLYKLMGHFAWWTAFVTNVNASSSEAFLIGCNYLGKPREQIDGYVMHANYIFWRNTNPIQLSSYSLFDMSKFPLKLRGTAVMSLKEGQINDMILSLLSKGRLIIRENNRVVISSDVLVNN

SEQ ID NO: 69 - DNA, 13218 bp, Severe acute respiratory syndrome coronavirus 2
atggagagccttgtccctggtttcaacgagaaaacacacgtccaactcagtttgcctgttttacaggttcgcgacgtgctcgtacgtggctttggagactccgtggaggaggtcttatcagaggcacgtcaacatcttaaagatggcacttgtggcttagtagaagttgaaaaaggcgttttgcctcaacttgaacagccctatgtgttcatcaaacgttcggatgctcgaactgcacctcatggtcatgttatggttgagctggtagcagaactcgaaggcattcagtacggtcgtagtggtgagacacttggtgtccttgtccctcatgtgggcgaaataccagtggcttaccgcaaggttcttcttcgtaagaacggtaataaaggagctggtggccatagttacggcgccgatctaaagtcatttgacttaggcgacgagcttggcactgatccttatgaagattttcaagaaaactggaacactaaacatagcagtggtgttacccgtgaactcatgcgtgagcttaacggaggggcatacactcgctatgtcgataacaacttctgtggccctgatggctaccctcttgagtgcattaaagaccttctagcacgtgctggtaaagcttcatgcactttgtccgaacaactggactttattgacactaagaggggtgtatactgctgccgtgaacatgagcatgaaattgcttggtacacggaacgttctgaaaagagctatgaattgcagacaccttttgaaattaaattggcaaagaaatttgacaccttcaatggggaatgtccaaattttgtatttcccttaaattccataatcaagactattcaaccaagggttgaaaagaaaaagcttgatggctttatgggtagaattcgatctgtctatccagttgcgtcaccaaatgaatgcaaccaaatgtgcctttcaactctcatgaagtgtgatcattgtggtgaaacttcatggcagacgggcgattttgttaaagccacttgcgaattttgtggcactgagaatttgactaaagaaggtgccactacttgtggttacttaccccaaaatgctgttgttaaaatttattgtccagcatgtcacaattcagaagtaggacctgagcatagtcttgccgaataccataatgaatctggcttgaaaaccattcttcgtaagggtggtcgcactattgcctttggaggctgtgtgttctcttatgttggttgccataacaagtgtgcctattgggttccacgtgctagcgctaacataggttgtaaccatacaggtgttgttggagaaggttccgaaggtcttaatgacaaccttcttgaaatactccaaaaagagaaagtcaacatcaatattgttggtgactttaaacttaatgaagagatcgccattattttggcatctttttctgcttccacaagtgcttttgtggaaactgtgaaaggtttggattataaagcattcaaacaaattgttgaatcctgtggtaattttaaagttacaaaaggaaaagctaaaaaaggtgcctggaatattggtgaacagaaatcaatactgagtcctctttatgcatttgcatcagaggctgctcgtgttgtacgatcaattttctcccgcactcttgaaactgctcaaaattctgtgcgtgttttacagaaggccgctataacaatactagatggaatttcacagtattcactgagactcattgatgctatgatgttcacatctgatttggctactaacaatctagttgtaatggcctacattacaggtggtgttgttcagttgacttcgcagtggctaactaacatctttggcactgtttatgaaaaactcaaacccgtccttgattggcttgaagagaagtttaaggaaggtgtagagtttcttagagacggttgggaaattgttaaatttatctcaacctgtgcttgtgaaattgtcggtggacaaattgtcacctgtgcaaaggaaattaaggagagtgttcagacattctttaagcttgtaaataaatttttggctttgtgtgctgactctatcattattggtggagctaaacttaaagccttgaatttaggtgaaacatttgtcacgcactcaaagggattgtacagaaagtgtgttaaatccagagaagaaactggcctactcatgcctctaaaagccccaaaagaaattatcttcttagagggagaaacacttcccacagaagtgttaacagaggaagttgtcttgaaaactggtgatttacaaccattagaacaacctactagtgaagctgttgaagctccattggttggtacaccagtttgtattaacgggcttatgttgctcgaaatcaaagacacagaaaagtactgtgcccttgcacctaatatgatggtaacaaacaataccttcacactcaaaggcggtgcaccaacaaaggttacttttggtgatgacactgtgatagaagtgcaaggttacaagagtgtgaatatcacttttgaacttgatgaaaggattgataaagtacttaatgagaagtgctctgcctatacagttgaactcggtacagaagtaaatgagttcgcctgtgttgtggcagatgctgtcataaaaactttgcaaccagtatctgaattacttacaccactgggcattgatttagatgagtggagtatggctacatactacttatttgatgagtctggtgagtttaaattggcttcacatatgtattgttctttttaccctccagatgaggatgaagaagaaggtgattgtgaagaagaagagtttgagccatcaactcaatatgagtatggtactgaagatgattaccaaggtaaacctttggaatttggtgccacttctgctgctcttcaacctgaagaagagcaagaagaagattggttagatgatgatagtcaacaaactgttggtcaacaagacggcagtgaggacaatcagacaactactattcaaacaattgttgaggttcaacctcaattagagatggaacttacaccagttgttcagactattgaagtgaatagttttagtggttatttaaaacttactgacaatgtatacattaaaaatgcagacattgtggaagaagctaaaaaggtaaaaccaacagtggttgttaatgcagccaatgtttaccttaaacatggaggaggtgttgcaggagccttaaataaggctactaacaatgccatgcaagttgaatctgatgattacatagctactaatggaccacttaaagtgggtggtagttgtgttttaagcggacacaatcttgctaaacactgtcttcatgttgtcggcccaaatgttaacaaaggtgaagacattcaacttcttaagagtgcttatgaaaattttaatcagcacgaagttctacttgcaccattattatcagctggtatttttggtgctgaccctatacattctttaagagtttgtgtagatactgttcgcacaaatgtctacttagctgtctttgataaaaatctctatgacaaacttgtttcaagctttttggaaatgaagagtgaaaagcaagttgaacaaaagatcgctgagattcctaaagaggaagttaagccatttataactgaaagtaaaccttcagttgaacagagaaaacaagatgataagaaaatcaaagcttgtgttgaagaagttacaacaactctggaagaaactaagttcctcacagaaaacttgttactttatattgacattaatggcaatcttcatccagattctgccactcttgttagtgacattgacatcactttcttaaagaaagatgctccatatatagtgggtgatgttgttcaagagggtgttttaactgctgtggttatacctactaaaaaggctggtggcactactgaaatgctagcgaaagctttgagaaaagtgccaacagacaattatataaccacttacccgggtcagggtttaaatggttacactgtagaggaggcaaagacagtgcttaaaaagtgtaaaagtgccttttacattctaccatctattatctctaatgagaagcaagaaattcttggaactgtttcttggaatttgcgagaaatgcttgcacatgcagaagaaacacgcaaattaatgcctgtctgtgtggaaactaaagccatagtttcaactatacagcgtaaatataagggtattaaaatacaagagggtgtggttgattatggtgctagattttacttttacaccagtaaaacaactgtagcgtcacttatcaacacacttaacgatctaaatgaaactcttgttacaatgccacttggctatgtaacacatggcttaaatttggaagaagctgctcggtatatgagatctctcaaagtgccagctacagtttctgtttcttcacctgatgctgttacagcgtataatggttatcttacttcttcttctaaaacacctgaagaacattttattgaaaccatctcacttgctggttcctataaagattggtcctattctggacaatctacacaactaggtatagaatttcttaagagaggtgataaaagtgtatattacactagtaatcctaccacattccacctagatggtgaagttatcacctttgacaatcttaagacacttctttctttgagagaagtgaggactattaaggtgtttacaacagtagacaacattaacctccacacgcaagttgtggacatgtcaatgacatatggacaacagtttggtccaacttatttggatggagctgatgttactaaaataaaacctcataattcacatgaaggtaaaacattttatgttttacctaatgatgacactctacgtgttgaggcttttgagtactaccacacaactgatcctagttttctgggtaggtacatgtcagcattaaatcacactaaaaagtggaaatacccacaagttaatggtttaacttctattaaatgggcagataacaactgttatcttgccactgcattgttaacactccaacaaatagagttgaagtttaatccacctgctctacaagatgcttattacagagcaagggctggtgaagctgctaacttttgtgcacttatcttagcctactgtaataagacagtaggtgagttaggtgatgttagagaaacaatgagttacttgtttcaacatgccaatttagattcttgcaaaagagtcttgaacgtggtgtgtaaaacttgtggacaacagcagacaacccttaagggtgtagaagctgttatgtacatgggcacactttcttatgaacaatttaagaaaggtgttcagataccttgtacgtgtggtaaacaagctacaaaatatctagtacaacaggagtcaccttttgttatgatgtcagcaccacctgctcagtatgaacttaagcatggtacatttacttgtgctagtgagtacactggtaattaccagtgtggtcactataaacatataacttctaaagaaactttgtattgcatagacggtgctttacttacaaagtcctcagaatacaaaggtcctattacggatgttttctacaaagaaaacagttacacaacaaccataaaaccagttacttataaattggatggtgttgtttgtacagaaattgaccctaagttggacaattattataagaaagacaattcttatttcacagagcaaccaattgatcttgtaccaaaccaaccatatccaaacgcaagcttcgataattttaagtttgtatgtgataatatcaaatttgctgatgatttaaaccagttaactggttataagaaacctgcttcaagagagcttaaagttacatttttccctgacttaaatggtgatgtggtggctattgattataaacactacacaccctcttttaagaaaggagctaaattgttacataaacctattgtttggcatgttaacaatgcaactaataaagccacgtataaaccaaatacctggtgtatacgttgtctttggagcacaaaaccagttgaaacatcaaattcgtttgatgtactgaagtcagaggacgcgcagggaatggataatcttgcctgcgaagatctaaaaccagtctctgaagaagtagtggaaaatcctaccatacagaaagacgttcttgagtgtaatgtgaaaactaccgaagttgtaggagacattatacttaaaccagcaaataatagtttaaaaattacagaagaggttggccacacagatctaatggctgcttatgtagacaattctagtcttactattaagaaacctaatgaattatctagagtattaggtttgaaaacccttgctactcatggtttagctgctgttaatagtgtcccttgggatactatagctaattatgctaagccttttcttaacaaagttgttagtacaactactaacatagttacacggtgtttaaaccgtgtttgtactaattatatgccttatttctttactttattgctacaattgtgtacttttactagaagtacaaattctagaattaaagcatctatgccgactactatagcaaagaatactgttaagagtgtcggtaaattttgtctagaggcttcatttaattatttgaagtcacctaatttttctaaactgataaatattataatttggtttttactattaagtgtttgcctaggttctttaatctactcaaccgctgctttaggtgttttaatgtctaatttaggcatgccttcttactgtactggttacagagaaggctatttgaactctactaatgtcactattgcaacctactgtactggttctataccttgtagtgtttgtcttagtggtttagattctttagacacctatccttctttagaaactatacaaattaccatttcatcttttaaatgggatttaactgcttttggcttagttgcagagtggtttttggcatatattcttttcactaggtttttctatgtacttggattggctgcaatcatgcaattgtttttcagctattttgcagtacattttattagtaattcttggcttatgtggttaataattaatcttgtacaaatggccccgatttcagctatggttagaatgtacatcttctttgcatcattttattatgtatggaaaagttatgtgcatgttgtagacggttgtaattcatcaacttgtatgatgtgttacaaacgtaatagagcaacaagagtcgaatgtacaactattgttaatggtgttagaaggtccttttatgtctatgctaatggaggtaaaggcttttgcaaactacacaattggaattgtgttaattgtgatacattctgtgctggtagtacatttattagtgatgaagttgcgagagacttgtcactacagtttaaaagaccaataaatcctactgaccagtcttcttacatcgttgatagtgttacagtgaagaatggttccatccatctttactttgataaagctggtcaaaagacttatgaaagacattctctctctcattttgttaacttagacaacctgagagctaataacactaaaggttcattgcctattaatgttatagtttttgatggtaaatcaaaatgtgaagaatcatctgcaaaatcagcgtctgtttactacagtcagcttatgtgtcaacctatactgttactagatcaggcattagtgtctgatgttggtgatagtgcggaagttgcagttaaaatgtttgatgcttacgttaatacgttttcatcaacttttaacgtaccaatggaaaaactcaaaacactagttgcaactgcagaagctgaacttgcaaagaatgtgtccttagacaatgtcttatctacttttatttcagcagctcggcaagggtttgttgattcagatgtagaaactaaagatgttgttgaatgtcttaaattgtcacatcaatctgacatagaagttactggcgatagttgtaataactatatgctcacctataacaaagttgaaaacatgacaccccgtgaccttggtgcttgtattgactgtagtgcgcgtcatattaatgcgcaggtagcaaaaagtcacaacattgctttgatatggaacgttaaagatttcatgtcattgtctgaacaactacgaaaacaaatacgtagtgctgctaaaaagaataacttaccttttaagttgacatgtgcaactactagacaagttgttaatgttgtaacaacaaagatagcacttaagggtggtaaaattgttaataattggttgaagcagttaattaaagttacacttgtgttcctttttgttgctgctattttctatttaataacacctgttcatgtcatgtctaaacatactgacttttcaagtgaaatcataggatacaaggctattgatggtggtgtcactcgtgacatagcatctacagatacttgttttgctaacaaacatgctgattttgacacatggtttagccagcgtggtggtagttatactaatgacaaagcttgcccattgattgctgcagtcataacaagagaagtgggttttgtcgtgcctggtttgcctggcacgatattacgcacaactaatggtgactttttgcatttcttacctagagtttttagtgcagttggtaacatctgttacacaccatcaaaacttatagagtacactgactttgcaacatcagcttgtgttttggctgctgaatgtacaatttttaaagatgcttctggtaagccagtaccatattgttatgataccaatgtactagaaggttctgttgcttatgaaagtttacgccctgacacacgttatgtgctcatggatggctctattattcaatttcctaacacctaccttgaaggttctgttagagtggtaacaacttttgattctgagtactgtaggcacggcacttgtgaaagatcagaagctggtgtttgtgtatctactagtggtagatgggtacttaacaatgattattacagatctttaccaggagttttctgtggtgtagatgctgtaaatttacttactaatatgtttacaccactaattcaacctattggtgctttggacatatcagcatctatagtagctggtggtattgtagctatcgtagtaacatgccttgcctactattttatgaggtttagaagagcttttggtgaatacagtcatgtagttgcctttaatactttactattccttatgtcattcactgtactctgtttaacaccagtttactcattcttacctggtgtttattctgttatttacttgtacttgacattttatcttactaatgatgtttcttttttagcacatattcagtggatggttatgttcacacctttagtacctttctggataacaattgcttatatcatttgtatttccacaaagcatttctattggttctttagtaattacctaaagagacgtgtagtctttaatggtgtttcctttagtacttttgaagaagctgcgctgtgcacctttttgttaaataaagaaatgtatctaaagttgcgtagtgatgtgctattacctcttacgcaatataatagatacttagctctttataataagtacaagtattttagtggagcaatggatacaactagctacagagaagctgcttgttgtcatctcgcaaaggctctcaatgacttcagtaactcaggttctgatgttctttaccaaccaccacaaacctctatcacctcagctgttttgcagagtggttttagaaaaatggcattcccatctggtaaagttgagggttgtatggtacaagtaacttgtggtacaactacacttaacggtctttggcttgatgacgtagtttactgtccaagacatgtgatctgcacctctgaagacatgcttaaccctaattatgaagatttactcattcgtaagtctaatcataatttcttggtacaggctggtaatgttcaactcagggttattggacattctatgcaaaattgtgtacttaagcttaaggttgatacagccaatcctaagacacctaagtataagtttgttcgcattcaaccaggacagactttttcagtgttagcttgttacaatggttcaccatctggtgtttaccaatgtgctatgaggcccaatttcactattaagggttcattccttaatggttcatgtggtagtgttggttttaacatagattatgactgtgtctctttttgttacatgcaccatatggaattaccaactggagttcatgctggcacagacttagaaggtaacttttatggaccttttgttgacaggcaaacagcacaagcagctggtacggacacaactattacagttaatgttttagcttggttgtacgctgctgttataaatggagacaggtggtttctcaatcgatttaccacaactcttaatgactttaaccttgtggctatgaagtacaattatgaacctctaacacaagaccatgttgacatactaggacctctttctgctcaaactggaattgccgttttagatatgtgtgcttcattaaaagaattactgcaaaatggtatgaatggacgtaccatattgggtagtgctttattagaagatgaatttacaccttttgatgttgttagacaatgctcaggtgttactttccaaagtgcagtgaaaagaacaatcaagggtacacaccactggttgttactcacaattttgacttcacttttagttttagtccagagtactcaatggtctttgttcttttttttgtatgaaaatgcctttttaccttttgctatgggtattattgctatgtctgcttttgcaatgatgtttgtcaaacataagcatgcatttctctgtttgtttttgttaccttctcttgccactgtagcttattttaatatggtctatatgcctgctagttgggtgatgcgtattatgacatggttggatatggttgatactagtttgtctggttttaagctaaaagactgtgttatgtatgcatcagctgtagtgttactaatccttatgacagcaagaactgtgtatgatgatggtgctaggagagtgtggacacttatgaatgtcttgacactcgtttataaagtttattatggtaatgctttagatcaagccatttccatgtgggctcttataatctctgttacttctaactactcaggtgtagttacaactgtcatgtttttggccagaggtattgtttttatgtgtgttgagtattgccctattttcttcataactggtaatacacttcagtgtataatgctagtttattgtttcttaggctatttttgtacttgttactttggcctcttttgtttactcaaccgctactttagactgactcttggtgtttatgattacttagtttctacacaggagtttagatatatgaattcacagggactactcccacccaagaatagcatagatgccttcaaactcaacattaaattgttgggtgttggtggcaaaccttgtatcaaagtagccactgtacagtctaaaatgtcagatgtaaagtgcacatcagtagtcttactctcagttttgcaacaactcagagtagaatcatcatctaaattgtgggctcaatgtgtccagttacacaatgacattctcttagctaaagatactactgaagcctttgaaaaaatggtttcactactttctgttttgctttccatgcagggtgctgtagacataaacaagctttgtgaagaaatgctggacaacagggcaaccttacaagctatagcctcagagtttagttcccttccatcatatgcagcttttgctactgctcaagaagcttatgagcaggctgttgctaatggtgattctgaagttgttcttaaaaagttgaagaagtctttgaatgtggctaaatctgaatttgaccgtgatgcagccatgcaacgtaagttggaaaagatggctgatcaagctatgacccaaatgtataaacaggctagatctgaggacaagagggcaaaagttactagtgctatgcagacaatgcttttcactatgcttagaaagttggataatgatgcactcaacaacattatcaacaatgcaagagatggttgtgttcccttgaacataatacctcttacaacagcagccaaactaatggttgtcataccagactataacacatataaaaatacgtgtgatggtacaacatttacttatgcatcagcattgtgggaaatccaacaggttgtagatgcagatagtaaaattgttcaacttagtgaaattagtatggacaattcacctaatttagcatggcctcttattgtaacagctttaagggccaattctgctgtcaaattacagaataatgagcttagtcctgttgcactacgacagatgtcttgtgctgccggtactacacaaactgcttgcactgatgacaatgcgttagcttactacaacacaacaaagggaggtaggtttgtacttgcactgttatccgatttacaggatttgaaatgggctagattccctaagagtgatggaactggtactatctatacagaactggaaccaccttgtaggtttgttacagacacacctaaaggtcctaaagtgaagtatttatactttattaaaggattaaacaacctaaatagaggtatggtacttggtagtttagctgccacagtacgtctacaagctggtaatgcaacagaagtgcctgccaattcaactgtattatctttctgtgcttttgctgtagatgctgctaaagcttacaaagattatctagctagtgggggacaaccaatcactaattgtgttaagatgttgtgtacacacactggtactggtcaggcaataacagttacaccggaagccaatatggatcaagaatcctttggtggtgcatcgtgttgtctgtactgccgttgccacatagatcatccaaatcctaaaggattttgtgacttaaaaggtaagtatgtacaaatacctacaacttgtgctaatgaccctgtgggttttacacttaaaaacacagtctgtaccgtctgcggtatgtggaaaggttatggctgtagttgtgatcaactccgcgaacccatgcttcagtcagctgatgcacaatcgtttttaaacgggtttgcggtgtaa

SEQ ID NO: 70 - protein, 4405 aa, Severe acute respiratory syndrome coronavirus 2 [sequence omitted]

SEQ ID NO: 71 - DNA, 3822 bp, Severe acute respiratory syndrome coronavirus 2
atgtttgtttttcttgttttattgccactagtttctagtcagtgtgttaatcttacaaccagaactcaattaccccctgcatacactaattctttcacacgtggtgtttattaccctgacaaagttttcagatcctcagttttacattcaactcaggacttgttcttacctttcttttccaatgttacttggttccatgctatacatgtctctgggaccaatggtactaagaggtttgataaccctgtcctaccatttaatgatggtgtttattttgcttccactgagaagtctaacataataagaggctggatttttggtactactttagattcgaagacccagtccctacttattgttaataacgctactaatgttgttattaaagtctgtgaatttcaattttgtaatgatccatttttgggtgtttattaccacaaaaacaacaaaagttggatggaaagtgagttcagagtttattctagtgcgaataattgcacttttgaatatgtctctcagccttttcttatggaccttgaaggaaaacagggtaatttcaaaaatcttagggaatttgtgtttaagaatattgatggttattttaaaatatattctaagcacacgcctattaatttagtgcgtgatctccctcagggtttttcggctttagaaccattggtagatttgccaataggtattaacatcactaggtttcaaactttacttgctttacatagaagttatttgactcctggtgattcttcttcaggttggacagctggtgctgcagcttattatgtgggttatcttcaacctaggacttttctattaaaatataatgaaaatggaaccattacagatgctgtagactgtgcacttgaccctctctcagaaacaaagtgtacgttgaaatccttcactgtagaaaaaggaatctatcaaacttctaactttagagtccaaccaacagaatctattgttagatttcctaatattacaaacttgtgcccttttggtgaagtttttaacgccaccagatttgcatctgtttatgcttggaacaggaagagaatcagcaactgtgttgctgattattctgtcctatataattccgcatcattttccacttttaagtgttatggagtgtctcctactaaattaaatgatctctgctttactaatgtctatgcagattcatttgtaattagaggtgatgaagtcagacaaatcgctccagggcaaactggaaagattgctgattataattataaattaccagatgattttacaggctgcgttatagcttggaattctaacaatcttgattctaaggttggtggtaattataattacctgtatagattgtttaggaagtctaatctcaaaccttttgagagagatatttcaactgaaatctatcaggccggtagcacaccttgtaatggtgttgaaggttttaattgttactttcctttacaatcatatggtttccaacccactaatggtgttggttaccaaccatacagagtagtagtactttcttttgaacttctacatgcaccagcaactgtttgtggacctaaaaagtctactaatttggttaaaaacaaatgtgtcaatttcaacttcaatggtttaacaggcacaggtgttcttactgagtctaacaaaaagtttctgcctttccaacaatttggcagagacattgctgacactactgatgctgtccgtgatccacagacacttgagattcttgacattacaccatgttcttttggtggtgtcagtgttataacaccaggaacaaatacttctaaccaggttgctgttctttatcagggtgttaactgcacagaagtccctgttgctattcatgcagatcaacttactcctacttggcgtgtttattctacaggttctaatgtttttcaaacacgtgcaggctgtttaataggggctgaacatgtcaacaactcatatgagtgtgacatacccattggtgcaggtatatgcgctagttatcagactcagactaattctcctcggcgggcacgtagtgtagctagtcaatccatcattgcctacactatgtcacttggtgcagaaaattcagttgcttactctaataactctattgccatacccacaaattttactattagtgttaccacagaaattctaccagtgtctatgaccaagacatcagtagattgtacaatgtacatttgtggtgattcaactgaatgcagcaatcttttgttgcaatatggcagtttttgtacacaattaaaccgtgctttaactggaatagctgttgaacaagacaaaaacacccaagaagtttttgcacaagtcaaacaaatttacaaaacaccaccaattaaagattttggtggttttaatttttcacaaatattaccagatccatcaaaaccaagcaagaggtcatttattgaagatctacttttcaacaaagtgacacttgcagatgctggcttcatcaaacaatatggtgattgccttggtgatattgctgctagagacctcatttgtgcacaaaagtttaacggccttactgttttgccacctttgctcacagatgaaatgattgctcaatacacttctgcactgttagcgggtacaatcacttctggttggacctttggtgcaggtgctgcattacaaataccatttgctatgcaaatggcttataggtttaatggtattggagttacacagaatgttctctatgagaaccaaaaattgattgccaaccaatttaatagtgctattggcaaaattcaagactcactttcttccacagcaagtgcacttggaaaacttcaagatgtggtcaaccaaaatgcacaagctttaaacacgcttgttaaacaacttagctccaattttggtgcaatttcaagtgttttaaatgatatcctttcacgtcttgacaaagttgaggctgaagtgcaaattgataggttgatcacaggcagacttcaaagtttgcagacatatgtgactcaacaattaattagagctgcagaaatcagagcttctgctaatcttgctgctactaaaatgtcagagtgtgtacttggacaatcaaaaagagttgatttttgtggaaagggctatcatcttatgtccttccctcagtcagcacctcatggtgtagtcttcttgcatgtgacttatgtccctgcacaagaaaagaacttcacaactgctcctgccatttgtcatgatggaaaagcacactttcctcgtgaaggtgtctttgtttcaaatggcacacactggtttgtaacacaaaggaatttttatgaaccacaaatcattactacagacaacacatttgtgtctggtaactgtgatgttgtaataggaattgtcaacaacacagtttatgatcctttgcaacctgaattagactcattcaaggaggagttagataaatattttaagaatcatacatcaccagatgttgatttaggtgacatctctggcattaatgcttcagttgtaaacattcaaaaagaaattgaccgcctcaatgaggttgccaagaatttaaatgaatctctcatcgatctccaagaacttggaaagtatgagcagtatataaaatggccatggtacatttggctaggttttatagctggcttgattgccatagtaatggtgacaattatgctttgctgtatgaccagttgctgtagttgtctcaagggctgttgttcttgtggatcctgctgcaaatttgatgaagacgactctgagccagtgctcaaaggagtcaaattacattacacataa

SEQ ID NO: 72 - protein, 1273 aa, Severe acute respiratory syndrome coronavirus 2
MFVFLVLLPLVSSQCVNLTTRTQLPPAYTNSFTRGVYYPDKVFRSSVLHSTQDLFLPFFSNVTWFHAIHVSGTNGTKRFDNPVLPFNDGVYFASTEKSNIIRGWIFGTTLDSKTQSLLIVNNATNVVIKVCEFQFCNDPFLGVYYHKNNKSWMESEFRVYSSANNCTFEYVSQPFLMDLEGKQGNFKNLREFVFKNIDGYFKIYSKHTPINLVRDLPQGFSALEPLVDLPIGINITRFQTLLALHRSYLTPGDSSSGWTAGAAAYYVGYLQPRTFLLKYNENGTITDAVDCALDPLSETKCTLKSFTVEKGIYQTSNFRVQPTESIVRFPNITNLCPFGEVFNATRFASVYAWNRKRISNCVADYSVLYNSASFSTFKCYGVSPTKLNDLCFTNVYADSFVIRGDEVRQIAPGQTGKIADYNYKLPDDFTGCVIAWNSNNLDSKVGGNYNYLYRLFRKSNLKPFERDISTEIYQAGSTPCNGVEGFNCYFPLQSYGFQPTNGVGYQPYRVVVLSFELLHAPATVCGPKKSTNLVKNKCVNFNFNGLTGTGVLTESNKKFLPFQQFGRDIADTTDAVRDPQTLEILDITPCSFGGVSVITPGTNTSNQVAVLYQGVNCTEVPVAIHADQLTPTWRVYSTGSNVFQTRAGCLIGAEHVNNSYECDIPIGAGICASYQTQTNSPRRARSVASQSIIAYTMSLGAENSVAYSNNSIAIPTNFTISVTTEILPVSMTKTSVDCTMYICGDSTECSNLLLQYGSFCTQLNRALTGIAVEQDKNTQEVFAQVKQIYKTPPIKDFGGFNFSQILPDPSKPSKRSFIEDLLFNKVTLADAGFIKQYGDCLGDIAARDLICAQKFNGLTVLPPLLTDEMIAQYTSALLAGTITSGWTFGAGAALQIPFAMQMAYRFNGIGVTQNVLYENQKLIANQFNSAIGKIQDSLSSTASALGKLQDVVNQNAQALNTLVKQLSSNFGAISSVLNDILSRLDKVEAEVQIDRLITGRLQSLQTYVTQQLIRAAEIRASANLAATKMSECVLGQSKRVDFCGKGYHLMSFPQSAPHGVVFLHVTYVPAQEKNFTTAPAICHDGKAHFPREGVFVSNGTHWFVTQRNFYEPQIITTDNTFVSGNCDVVIGIVNNTVYDPLQPELDSFKEELDKYFKNHTSPDVDLGDISGINASVVNIQKEIDRLNEVAKNLNESLIDLQELGKYEQYIKWPWYIWLGFIAGLIAIVMVTIMLCCMTSCCSCLKGCCSCGSCCKFDEDDSEPVLKGVKLHYT

SEQ ID NO: 73 - DNA, 828 bp, Severe acute respiratory syndrome coronavirus 2; identical to SEQ ID NO: 25

SEQ ID NO: 74 - protein, 275 aa, Severe acute respiratory syndrome coronavirus 2; identical to SEQ ID NO: 26

SEQ ID NO: 75 - DNA, 228 bp, Severe acute respiratory syndrome coronavirus 2; identical to SEQ ID NO: 27

SEQ ID NO: 76 - protein, 75 aa, Severe acute respiratory syndrome coronavirus 2; identical to SEQ ID NO: 28

SEQ ID NO: 77 - DNA, 669 bp, Severe acute respiratory syndrome coronavirus 2; identical to SEQ ID NO: 29

SEQ ID NO: 78 - protein, 222 aa, Severe acute respiratory syndrome coronavirus 2; identical to SEQ ID NO: 30

SEQ ID NO: 79 - DNA, 186 bp, Severe acute respiratory syndrome coronavirus 2; identical to SEQ ID NO: 31

SEQ ID NO: 80 - protein, 61 aa, Severe acute respiratory syndrome coronavirus 2; identical to SEQ ID NO: 32

SEQ ID NO: 81 - DNA, 366 bp, Severe acute respiratory syndrome coronavirus 2; identical to SEQ ID NO: 33

SEQ ID NO: 82 - protein, 121 aa, Severe acute respiratory syndrome coronavirus 2; identical to SEQ ID NO: 34

SEQ ID NO: 83 - DNA, 132 bp, Severe acute respiratory syndrome coronavirus 2; identical to SEQ ID NO: 35

SEQ ID NO: 84 - protein, 43 aa, Severe acute respiratory syndrome coronavirus 2; identical to SEQ ID NO: 36

SEQ ID NO: 85 - DNA, 366 bp, Severe acute respiratory syndrome coronavirus 2; identical to SEQ ID NO: 37

SEQ ID NO: 86 - protein, 121 aa, Severe acute respiratory syndrome coronavirus 2; identical to SEQ ID NO: 38

SEQ ID NO: 87 - DNA, 1260 bp, Severe acute respiratory syndrome coronavirus 2; identical to SEQ ID NO: 39

SEQ ID NO: 88 - protein, 419 aa, Severe acute respiratory syndrome coronavirus 2; identical to SEQ ID NO: 40

SEQ ID NO: 89 - DNA, 117 bp, Severe acute respiratory syndrome coronavirus 2; identical to SEQ ID NO: 41

SEQ ID NO: 90 - protein, 38 aa, Severe acute respiratory syndrome coronavirus 2; identical to SEQ ID NO: 42

SEQ ID NO: 91 - DNA, 21291 bp, Severe acute respiratory syndrome coronavirus 2
atggagagccttgtccctggtttcaacgagaaaacacacgtccaactcagtttgcctgttttacaggttcgcgacgtgctcgtacgtggctttggagactccgtggaggaggtcttatcagaggcacgtcaacatcttaaagatggcacttgtggcttagtagaagttgaaaaaggcgttttgcctcaacttgaacagccctatgtgttcatcaaacgttcggatgctcgaactgcacctcatggtcatgttatggttgagctggtagcagaactcgaaggcattcagtacggtcgtagtggtgagacacttggtgtccttgtccctcatgtgggcgaaataccagtggcttaccgcaaggttcttcttcgtaagaacggtaataaaggagctggtggccatagttacggcgccgatctaaagtcatttgacttaggcgacgagcttggcactgatccttatgaagattttcaagaaaactggaacactaaacatagcagtggtgttacccgtgaactcatgcgtgagcttaacggaggggcatacactcgctatgtcgataacaacttctgtggccctgatggctaccctcttgagtgcattaaagaccttctagcacgtgctggtaaagcttcatgcactttgtccgaacaactggactttattgacactaagaggggtgtatactgctgccgtgaacatgagcatgaaattgcttggtacacggaacgttctgaaaagagctatgaattgcagacaccttttgaaattaaattggcaaagaaatttgacaccttcaatggggaatgtccaaattttgtatttcccttaaattccataatcaagactattcaaccaagggttgaaaagaaaaagcttgatggctttatgggtagaattcgatctgtctatccagttgcgtcaccaaatgaatgcaaccaaatgtgcctttcaactctcatgaagtgtgatcattgtggtgaaacttcatggcagacgggcgattttgttaaagccacttgcgaattttgtggcactgagaatttgactaaagaaggtgccactacttgtggttacttaccccaaaatgctgttgttaaaatttattgtccagcatgtcacaattcagaagtaggacctgagcatagtcttgccgaataccataatgaatctggcttgaaaaccattcttcgtaagggtggtcgcactattgcctttggaggctgtgtgttctcttatgttggttgccataacaagtgtgcctattgggttccacgtgctagcgctaacataggttgtaaccatacaggtgttgttggagaaggttccgaaggtcttaatgacaaccttcttgaaatactccaaaaagagaaagtcaacatcaatattgttggtgactttaaacttaatgaagagatcgccattattttggcatctttttctgcttccacaagtgcttttgtggaaactgtgaaaggtttggattataaagcattcaaacaaattgttgaatcctgtggtaattttaaagttacaaaaggaaaagctaaaaaaggtgcctggaatattggtgaacagaaatcaatactgagtcctctttatgcatttgcatcagaggctgctcgtgttgtacgatcaattttctcccgcactcttgaaactgctcaaaattctgtgcgtgttttacagaaggccgctataacaatactagatggaatttcacagtattcactgagactcattgatgctatgatgttcacatctgatttggctactaacaatctagttgtaatggcctacattacaggtggtgttgttcagttgacttcgcagtggctaactaacatctttggcactgtttatgaaaaactcaaacccgtccttgattggcttgaagagaagtttaaggaaggtgtagagtttcttagagacggttgggaaattgttaaatttatctcaacctgtgcttgtgaaattgtcggtggacaaattgtcacctgtgcaaaggaaattaaggagagtgttcagacattctttaagcttgtaaataaatttttggctttgtgtgctgactctatcattattggtggagctaaacttaaagccttgaatttaggtgaaacatttgtcacgcactcaaagggattgtacagaaagtgtgttaaatccagagaagaaactggcctactcatgcctctaaaagccccaaaagaaattatcttcttagagggagaaacacttcccacagaagtgttaacagaggaagttgtcttgaaaactggtgatttacaaccattagaacaacctactagtgaagctgttgaagctccattggttggtacaccagtttgtattaacgggcttatgttgctcgaaatcaaagacacagaaaagtactgtgcccttgcacctaatatgatggtaacaaacaataccttcacactcaaaggcggtgcaccaacaaaggttacttttggtgatgacactgtgatagaagtgcaaggttacaagagtgtgaatatcacttttgaacttgatgaaaggattgataaagtacttaatgagaagtgctctgcctatacagttgaactcggtacagaagtaaatgagttcgcctgtgttgtggcagatgctgtcataaaaactttgcaaccagtatctgaattacttacaccactgggcattgatttagatgagtggagtatggctacatactacttatttgatgagtctggtgagtttaaattggcttcacatatgtattgttctttttaccctccagatgaggatgaagaagaaggtgattgtgaagaagaagagtttgagccatcaactcaatatgagtatggtactgaagatgattaccaaggtaaacctttggaatttggtgccacttctgctgctcttcaacctgaagaagagcaagaagaagattggttagatgatgatagtcaacaaactgttggtcaacaagacggcagtgaggacaatcagacaactactattcaaacaattgttgaggttcaacctcaattagagatggaacttacaccagttgttcagactattgaagtgaatagttttagtggttatttaaaacttactgacaatgtatacattaaaaatgcagacattgtggaagaagctaaaaaggtaaaaccaacagtggttgttaatgcagccaatgtttaccttaaacatggaggaggtgttgcaggagccttaaataaggctactaacaatgccatgcaagttgaatctgatgattacatagctactaatggaccacttaaagtgggtggtagttgtgttttaagcggacacaatcttgctaaacactgtcttcatgttgtcggcccaaatgttaacaaaggtgaagacattcaacttcttaagagtgcttatgaaaattttaatcagcacgaagttctacttgcaccattattatcagctggtatttttggtgctgaccctatacattctttaagagtttgtgtagatactgttcgcacaaatgtctacttagctgtctttgataaaaatctctatgacaaacttgtttcaagctttttggaaatgaagagtgaaaagcaagttgaacaaaagatcgctgagattcctaaagaggaagttaagccatttataactgaaagtaaaccttcagttgaacagagaaaacaagatgataagaaaatcaaagcttgtgttgaagaagttacaacaactctggaagaaactaagttcctcacagaaaacttgttactttatattgacattaatggcaatcttcatccagattctgccactcttgttagtgacattgacatcactttcttaaagaaagatgctccatatatagtgggtgatgttgttcaagagggtgttttaactgctgtggttatacctactaaaaaggctggtggcactactgaaatgctagcgaaagctttgagaaaagtgccaacagacaattatataaccacttacccgggtcagggtttaaatggttacactgtagaggaggcaaagacagtgcttaaaaagtgtaaaagtgccttttacattctaccatctattatctctaatgagaagcaagaaattcttggaactgtttcttggaatttgcgagaaatgcttgcacatgcagaagaaacacgcaaattaatgcctgtctgtgtggaaactaaagccatagtttcaactatacagcgtaaatataagggtattaaaatacaagagggtgtggttgattatggtgctagattttacttttacaccagtaaaacaactgtagcgtcacttatcaacacacttaacgatctaaatgaaactcttgttacaatgccacttggctatgtaacacatggcttaaatttggaagaagctgctcggtatatgagatctctcaaagtgccagctacagtttctgtttcttcacctgatgctgttacagcgtataatggttatcttacttcttcttctaaaacacctgaagaacattttattgaaaccatctcacttgctggttcctataaagattggtcctattctggacaatctacacaactaggtatagaatttcttaagagaggtgataaaagtgtatattacactagtaatcctaccacattccacctagatggtgaagttatcacctttgacaatcttaagacacttctttctttgagagaagtgaggactattaaggtgtttacaacagtagacaacattaacctccacacgcaagttgtggacatgtcaatgacatatggacaacagtttggtccaacttatttggatggagctgatgttactaaaataaaacctcataattcacatgaaggtaaaacattttatgttttacctaatgatgacactctacgtgttgaggcttttgagtactaccacacaactgatcctagttttctgggtaggtacatgtcagcattaaatcacactaaaaagtggaaatacccacaagttaatggtttaacttctattaaatgggcagataacaactgttatcttgccactgcattgttaacactccaacaaatagagttgaagtttaatccacctgctctacaagatgcttattacagagcaagggctggtgaagctgctaacttttgtgcacttatcttagcctactgtaataagacagtaggtgagttaggtgatgttagagaaacaatgagttacttgtttcaacatgccaatttagattcttgcaaaagagtcttgaacgtggtgtgtaaaacttgtggacaacagcagacaacccttaagggtgtagaagctgttatgtacatgggcacactttcttatgaacaatttaagaaaggtgttcagataccttgtacgtgtggtaaacaagctacaaaatatctagtacaacaggagtcaccttttgttatgatgtcagcaccacctgctcagtatgaacttaagcatggtacatttacttgtgctagtgagtacactggtaattaccagtgtggtcactataaacatataacttctaaagaaactttgtattgcatagacggtgctttacttacaaagtcctcagaatacaaaggtcctattacggatgttttctacaaagaaaacagttacacaacaaccataaaaccagttacttataaattggatggtgttgtttgtacagaaattgaccctaagttggacaattattataagaaagacaattcttatttcacagagcaaccaattgatcttgtaccaaaccaaccatatccaaacgcaagcttcgataattttaagtttgtatgtgataatatcaaatttgctgatgatttaaaccagttaactggttataagaaacctgcttcaagagagcttaaagttacatttttccctgacttaaatggtgatgtggtggctattgattataaacactacacaccctcttttaagaaaggagctaaattgttacataaacctattgtttggcatgttaacaatgcaactaataaagccacgtataaaccaaatacctggtgtatacgttgtctttggagcacaaaaccagttgaaacatcaaattcgtttgatgtactgaagtcagaggacgcgcagggaatggataatcttgcctgcgaagatctaaaaccagtctctgaagaagtagtggaaaatcctaccatacagaaagacgttcttgagtgtaatgtgaaaactaccgaagttgtaggagacattatacttaaaccagcaaataatagtttaaaaattacagaagaggttggccacacagatctaatggctgcttatgtagacaattctagtcttactattaagaaacctaatgaattatctagagtattaggtttgaaaacccttgctactcatggtttagctgctgttaatagtgtcccttgggatactatagctaattatgctaagccttttcttaacaaagttgttagtacaactactaacatagttacacggtgtttaaaccgtgtttgtactaattatatgccttatttctttactttattgctacaattgtgtacttttactagaagtacaaattctagaattaaagcatctatgccgactactatagcaaagaatactgttaagagtgtcggtaaattttgtctagaggcttcatttaattatttgaagtcacctaatttttctaaactgataaatattataatttggtttttactattaagtgtttgcctaggttctttaatctactcaaccgctgctttaggtgttttaatgtctaatttaggcatgccttcttactgtactggttacagagaaggctatttgaactctactaatgtcactattgcaacctactgtactggttctataccttgtagtgtttgtcttagtggtttagattctttagacacctatccttctttagaaactatacaaattaccatttcatcttttaaatgggatttaactgcttttggcttagttgcagagtggtttttggcatatattcttttcactaggtttttctatgtacttggattggctgcaatcatgcaattgtttttcagctattttgcagtacattttattagtaattcttggcttatgtggttaataattaatcttgtacaaatggccccgatttcagctatggttagaatgtacatcttctttgcatcattttattatgtatggaaaagttatgtgcatgttgtagacggttgtaattcatcaacttgtatgatgtgttacaaacgtaatagagcaacaagagtcgaatgtacaactattgttaatggtgttagaaggtccttttatgtctatgctaatggaggtaaaggcttttgcaaactacacaattggaattgtgttaattgtgatacattctgtgctggtagtacatttattagtgatgaagttgcgagagacttgtcactacagtttaaaagaccaataaatcctactgaccagtcttcttacatcgttgatagtgttacagtgaagaatggttccatccatctttactttgataaagctggtcaaaagacttatgaaagacattctctctctcattttgttaacttagacaacctgagagctaataacactaaaggttcattgcctattaatgttatagtttttgatggtaaatcaaaatgtgaagaatcatctgcaaaatcagcgtctgtttactacagtcagcttatgtgtcaacctatactgttactagatcaggcattagtgtctgatgttggtgatagtgcggaagttgcagttaaaatgtttgatgcttacgttaatacgttttcatcaacttttaacgtaccaatggaaaaactcaaaacactagttgcaactgcagaagctgaacttgcaaagaatgtgtccttagacaatgtcttatctacttttatttcagcagctcggcaagggtttgttgattcagatgtagaaactaaagatgttgttgaatgtcttaaattgtcacatcaatctgacatagaagttactggcgatagttgtaataactatatgctcacctataacaaagttgaaaacatgacaccccgtgaccttggtgcttgtattgactgtagtgcgcgtcatattaatgcgcaggtagcaaaaagtcacaacattgctttgatatggaacgttaaagatttcatgtcattgtctgaacaactacgaaaacaaatacgtagtgctgctaaaaagaataacttaccttttaagttgacatgtgcaactactagacaagttgttaatgttgtaacaacaaagatagcacttaagggtggtaaaattgttaataattggttgaagcagttaattaaagttacacttgtgttcctttttgttgctgctattttctatttaataacacctgttcatgtcatgtctaaacatactgacttttcaagtgaaatcataggatacaaggctattgatggtggtgtcactcgtgacatagcatctacagatacttgttttgctaacaaacatgctgattttgacacatggtttagccagcgtggtggtagttatactaatgacaaagcttgcccattgattgctgcagtcataacaagagaagtgggttttgtcgtgcctggtttgcctggcacgatattacgcacaactaatggtgactttttgcatttcttacctagagtttttagtgcagttggtaacatctgttacacaccatcaaaacttatagagtacactgactttgcaacatcagcttgtgttttggctgctgaatgtacaatttttaaagatgcttctggtaagccagtaccatattgttatgataccaatgtactagaaggttctgttgcttatgaaagtttacgccctgacacacgttatgtgctcatggatggctctattattcaatttcctaacacctaccttgaaggttctgttagagtggtaacaacttttgattctgagtactgtaggcacggcacttgtgaaagatcagaagctggtgtttgtgtatctactagtggtagatgggtacttaacaatgattattacagatctttaccaggagttttctgtggtgtagatgctgtaaatttacttactaatatgtttacaccactaattcaacctattggtgctttggacatatcagcatctatagtagctggtggtattgtagctatcgtagtaacatgccttgcctactattttatgaggtttagaagagcttttggtgaatacagtcatgtagttgcctttaatactttactattccttatgtcattcactgtactctgtttaacaccagtttactcattcttacctggtgtttattctgttatttacttgtacttgacattttatcttactaatgatgtttcttttttagcacatattcagtggatggttatgttcacacctttagtacctttctggataacaattgcttatatcatttgtatttccacaaagcatttctattggttctttagtaattacctaaagagacgtgtagtctttaatggtgtttcctttagtacttttgaagaagctgcgctgtgcacctttttgttaaataaagaaatgtatctaaagttgcgtagtgatgtgctattacctcttacgcaatataatagatacttagctctttataataagtacaagtattttagtggagcaatggatacaactagctacagagaagctgcttgttgtcatctcgcaaaggctctcaatgacttcagtaactcaggttctgatgttctttaccaaccaccacaaacctctatcacctcagctgttttgcagagtggttttagaaaaatggcattcccatctggtaaagttgagggttgtatggtacaagtaacttgtggtacaactacacttaacggtctttggcttgatgacgtagtttactgtccaagacatgtgatctgcacctctgaagacatgcttaaccctaattatgaagatttactcattcgtaagtctaatcataatttcttggtacaggctggtaatgttcaactcagggttattggacattctatgcaaaattgtgtacttaagcttaaggttgatacagccaatcctaagacacctaagtataagtttgttcgcattcaaccaggacagactttttcagtgttagcttgttacaatggttcaccatctggtgtttaccaatgtgctatgaggcccaatttcactattaagggttcattccttaatggttcatgtggtagtgttggttttaacatagattatgactgtgtctctttttgttacatgcaccatatggaattaccaactggagttcatgctggcacagacttagaaggtaacttttatggaccttttgttgacaggcaaacagcacaagcagctggtacggacacaactattacagttaatgttttagcttggttgtacgctgctgttataaatggagacaggtggtttctcaatcgatttaccacaactcttaatgactttaaccttgtggctatgaagtacaattatgaacctctaacacaagaccatgttgacatactaggacctctttctgctcaaactggaattgccgttttagatatgtgtgcttcattaaaagaattactgcaaaatggtatgaatggacgtaccatattgggtagtgctttattagaagatgaatttacaccttttgatgttgttagacaatgctcaggtgttactttccaaagtgcagtgaaaagaacaatcaagggtacacaccactggttgttactcacaattttgacttcacttttagttttagtccagagtactcaatggtctttgttcttttttttgtatgaaaatgcctttttaccttttgctatgggtattattgctatgtctgcttttgcaatgatgtttgtcaaacataagcatgcatttctctgtttgtttttgttaccttctcttgccactgtagcttattttaatatggtctatatgcctgctagttgggtgatgcgtattatgacatggttggatatggttgatactagtttgtctggttttaagctaaaagactgtgttatgtatgcatcagctgtagtgttactaatccttatgacagcaagaactgtgtatgatgatggtgctaggagagtgtggacacttatgaatgtcttgacactcgtttataaagtttattatggtaatgctttagatcaagccatttccatgtgggctcttataatctctgttacttctaactactcaggtgtagttacaactgtcatgtttttggccagaggtattgtttttatgtgtgttgagtattgccctattttcttcataactggtaatacacttcagtgtataatgctagtttattgtttcttaggctatttttgtacttgttactttggcctcttttgtttactcaaccgctactttagactgactcttggtgtttatgattacttagtttctacacaggagtttagatatatgaattcacagggactactcccacccaagaatagcatagatgccttcaaactcaacattaaattgttgggtgttggtggcaaaccttgtatcaaagtagccactgtacagtctaaaatgtcagatgtaaagtgcacatcagtagtcttactctcagttttgcaacaactcagagtagaatcatcatctaaattgtgggctcaatgtgtccagttacacaatgacattctcttagctaaagatactactgaagcctttgaaaaaatggtttcactactttctgttttgctttccatgcagggtgctgtagacataaacaagctttgtgaagaaatgctggacaacagggcaaccttacaagctatagcctcagagtttagttcccttccatcatatgcagcttttgctactgctcaagaagcttatgagcaggctgttgctaatggtgattctgaagttgttcttaaaaagttgaagaagtctttgaatgtggctaaatctgaatttgaccgtgatgcagccatgcaacgtaagttggaaaagatggctgatcaagctatgacccaaatgtataaacaggctagatctgaggacaagagggcaaaagttactagtgctatgcagacaatgcttttcactatgcttagaaagttggataatgatgcactcaacaacattatcaacaatgcaagagatggttgtgttcccttgaacataatacctcttacaacagcagccaaactaatggttgtcataccagactataacacatataaaaatacgtgtgatggtacaacatttacttatgcatcagcattgtgggaaatccaacaggttgtagatgcagatagtaaaattgttcaacttagtgaaattagtatggacaattcacctaatttagcatggcctcttattgtaacagctttaagggccaattctgctgtcaaattacagaataatgagcttagtcctgttgcactacgacagatgtcttgtgctgccggtactacacaaactgcttgcactgatgacaatgcgttagcttactacaacacaacaaagggaggtaggtttgtacttgcactgttatccgatttacaggatttgaaatgggctagattccctaagagtgatggaactggtactatctatacagaactggaaccaccttgtaggtttgttacagacacacctaaaggtcctaaagtgaagtatttatactttattaaaggattaaacaacctaaatagaggtatggtacttggtagtttagctgccacagtacgtctacaagctggtaatgcaacagaagtgcctgccaattcaactgtattatctttctgtgcttttgctgtagatgctgctaaagcttacaaagattatctagctagtgggggacaaccaatcactaattgtgttaagatgttgtgtacacacactggtactggtcaggcaataacagttacaccggaagccaatatggatcaagaatcctttggtggtgcatcgtgttgtctgtactgccgttgccacatagatcatccaaatcctaaaggattttgtgacttaaaaggtaagtatgtacaaatacctacaacttgtgctaatgaccctgtgggttttacacttaaaaacacagtctgtaccgtctgcggtatgtggaaaggttatggctgtagttgtgatcaactccgcgaacccatgcttcagtcagctgatgcacaatcgtttttaaaccgggtttgcggtgtaagtgcagcccgtcttacaccgtgcggcacaggcactagtactgatgtcgtatacagggcttttgacatctacaatgataaagtagctggttttgctaaattcctaaaaactaattgttgtcgcttccaagaaaaggacgaagatgacaatttaattgattcttactttgtagttaagagacacactttctctaactaccaacatgaagaaacaatttataatttacttaaggattgtccagctgttgctaaacatgacttctttaagtttagaatagacggtgacatggtaccacatatatcacgtcaacgtcttactaaatacacaatggcagacctcgtctatgctttaaggcattttgatgaaggtaattgtgacacattaaaagaaatacttgtcacatacaattgttgtgatgatgattatttcaataaaaaggactggtatgattttgtagaaaacccagatatattacgcgtatacgccaacttaggtgaacgtgtacgccaagctttgttaaaaacagtacaattctgtgatgccatgcgaaatgctggtattgttggtgtactgacattagataatcaagatctcaatggtaactggtatgatttcggtgatttcatacaaaccacgccaggtagtggagttcctgttgtagattcttattattcattgttaatgcctatattaaccttgaccagggctttaactgcagagtcacatgttgacactgacttaacaaagccttacattaagtgggatttgttaaaatatgacttcacggaagagaggttaaaactctttgaccgttattttaaatattgggatcagacataccacccaaattgtgttaactgtttggatgacagatgcattctgcattgtgcaaactttaatgttttattctctacagtgttcccacttacaagttttggaccactagtgagaaaaatatttgttgatggtgttccatttgtagtttcaactggataccacttcagagagctaggtgttgtacataatcaggatgtaaacttacatagctctagacttagttttaaggaattacttgtgtatgctgctgaccctgctatgcacgctgcttctggtaatctattactagataaacgcactacgtgcttttcagtagctgcacttactaacaatgttgcttttcaaactgtcaaacccggtaattttaacaaagacttctatgactttgctgtgtctaagggtttctttaaggaaggaagttctgttgaattaaaacacttcttctttgctcaggatggtaatgctgctatcagcgattatgactactatcgttataatctaccaacaatgtgtgatatcagacaactactatttgtagttgaagttgttgataagtactttgattgttacgatggtggctgtattaatgctaaccaagtcatcgtcaacaacctagacaaatcagctggttttccatttaataaatggggtaaggctagactttattatgattcaatgagttatgaggatcaagatgcacttttcgcatatacaaaacgtaatgtcatccctactataactcaaatgaatcttaagtatgccattagtgcaaagaatagagctcgcaccgtagctggtgtctctatctgtagtactatgaccaatagacagtttcatcaaaaattattgaaatcaatagccgccactagaggagctactgtagtaattggaacaagcaaattctatggtggttggcacaacatgttaaaaactgtttatagtgatgtagaaaaccctcaccttatgggttgggattatcctaaatgtgatagagccatgcctaacatgcttagaattatggcctcacttgttcttgctcgcaaacatacaacgtgttgtagcttgtcacaccgtttctatagattagctaatgagtgtgctcaagtattgagtgaaatggtcatgtgtggcggttcactatatgttaaaccaggtggaacctcatcaggagatgccacaactgcttatgctaatagtgtttttaacatttgtcaagctgtcacggccaatgttaatgcacttttatctactgatggtaacaaaattgccgataagtatgtccgcaatttacaacacagactttatgagtgtctctatagaaatagagatgttgacacagactttgtgaatgagttttacgcatatttgcgtaaacatttctcaatgatgatactctctgacgatgctgttgtgtgtttcaatagcacttatgcatctcaaggtctagtggctagcataaagaactttaagtcagttctttattatcaaaacaatgtttttatgtctgaagcaaaatgttggactgagactgaccttactaaaggacctcatgaattttgctctcaacatacaatgctagttaaacagggtgatgattatgtgtaccttccttacccagatccatcaagaatcctaggggccggctgttttgtagatgatatcgtaaaaacagatggtacacttatgattgaacggttcgtgtctttagctatagatgcttacccacttactaaacatcctaatcaggagtatgctgatgtctttcatttgtacttacaatacataagaaagctacatgatgagttaacaggacacatgttagacatgtattctgttatgcttactaatgataacacttcaaggtattgggaacctgagttttatgaggctatgtacacaccgcatacagtcttacaggctgttggggcttgtgttctttgcaattcacagacttcattaagatgtggtgcttgcatacgtagaccattcttatgttgtaaatgctgttacgaccatgtcatatcaacatcacataaattagtcttgtctgttaatccgtatgtttgcaatgctccaggttgtgatgtcacagatgtgactcaactttacttaggaggtatgagctattattgtaaatcacataaaccacccattagttttccattgtgtgctaatggacaagtttttggtttatataaaaatacatgtgttggtagcgataatgttactgactttaatgcaattgcaacatgtgactggacaaatgctggtgattacattttagctaacacctgtactgaaagactcaagctttttgcagcagaaacgctcaaagctactgaggagacatttaaactgtcttatggtattgctactgtacgtgaagtgctgtctgacagagaattacatctttcatgggaagttggtaaacctagaccaccacttaaccgaaattatgtctttactggttatcgtgtaactaaaaacagtaaagtacaaataggagagtacacctttgaaaaaggtgactatggtgatgctgttgtttaccgaggtacaacaacttacaaattaaatgttggtgattattttgtgctgacatcacatacagtaatgccattaagtgcacctacactagtgccacaagagcactatgttagaattactggcttatacccaacactcaatatctcagatgagttttctagcaatgttgcaaattatcaaaaggttggtatgcaaaagtattctacactccagggaccacctggtactggtaagagtcattttgctattggcctagctctctactacccttctgctcgcatagtgtatacagcttgctctcatgccgctgttgatgcactatgtgagaaggcattaaaatatttgcctatagataaatgtagtagaattatacctgcacgtgctcgtgtagagtgttttgataaattcaaagtgaattcaacattagaacagtatgtcttttgtactgtaaatgcattgcctgagacgacagcagatatagttgtctttgatgaaatttcaatggccacaaattatgatttgagtgttgtcaatgccagattacgtgctaagcactatgtgtacattggcgaccctgctcaattacctgcaccacgcacattgctaactaagggcacactagaaccagaatatttcaattcagtgtgtagacttatgaaaactataggtccagacatgttcctcggaacttgtcggcgttgtcctgctgaaattgttgacactgtgagtgctttggtttatgataataagcttaaagcacataaagacaaatcagctcaatgctttaaaatgttttataagggtgttatcacgcatgatgtttcatctgcaattaacaggccacaaataggcgtggtaagagaattccttacacgtaaccctgcttggagaaaagctgtctttatttcaccttataattcacagaatgctgtagcctcaaagattttgggactaccaactcaaactgttgattcatcacagggctcagaatatgactatgtcatattcactcaaaccactgaaacagctcactcttgtaatgtaaacagatttaatgttgctattaccagagcaaaagtaggcatactttgcataatgtctgatagagacctttatgacaagttgcaatttacaagtcttgaaattccacgtaggaatgtggcaactttacaagctgaaaatgtaacaggactctttaaagattgtagtaaggtaatcactgggttacatcctacacaggcacctacacacctcagtgttgacactaaattcaaaactgaaggtttatgtgttgacatacctggcatacctaaggacatgacctatagaagactcatctctatgatgggttttaaaatgaattatcaagttaatggttaccctaacatgtttatcacccgcgaagaagctataagacatgtacgtgcatggattggcttcgatgtcgaggggtgtcatgctactagagaagctgttggtaccaatttacctttacagctaggtttttctacaggtgttaacctagttgctgtacctacaggttatgttgatacacctaataatacagatttttccagagttagtgctaaaccaccgcctggagatcaatttaaacacctcataccacttatgtacaaaggacttccttggaatgtagtgcgtataaagattgtacaaatgttaagtgacacacttaaaaatctctctgacagagtcgtatttgtcttatgggcacatggctttgagttgacatctatgaagtattttgtgaaaataggacctgagcgcacctgttgtctatgtgatagacgtgccacatgcttttccactgcttcagacacttatgcctgttggcatcattctattggatttgattacgtctataatccgtttatgattgatgttcaacaatggggttttacaggtaacctacaaagcaaccatgatctgtattgtcaagtccatggtaatgcacatgtagctagttgtgatgcaatcatgactaggtgtctagctgtccacgagtgctttgttaagcgtgttgactggactattgaatatcctataattggtgatgaactgaagattaatgcggcttgtagaaaggttcaacacatggttgttaaagctgcattattagcagacaaattcccagttcttcacgacattggtaaccctaaagctattaagtgtgtacctcaagctgatgtagaatggaagttctatgatgcacagccttgtagtgacaaagcttataaaatagaagaattattctattcttatgccacacattctgacaaattcacagatggtgtatgcctattttggaattgcaatgtcgatagatatcctgctaattccattgtttgtagatttgacactagagtgctatctaaccttaacttgcctggttgtgatggtggcagtttgtatgtaaataaacatgcattccacacaccagcttttgataaaagtgcttttgttaatttaaaacaattaccatttttctattactctgacagtccatgtgagtctcatggaaaacaagtagtgtcagatatagattatgtaccactaaagtctgctacgtgtataacacgttgcaatttaggtggtgctgtctgtagacatcatgctaatgagtacagattgtatctcgatgcttataacatgatgatctcagctggctttagcttgtgggtttacaaacaatttgatacttataacctctggaacacttttacaagacttcagagtttagaaaatgtggcttttaatgttgtaaataagggacactttgatggacaacagggtgaagtaccagtttctatcattaataacactgtttacacaaaagttgatggtgttgatgtagaattgtttgaaaataaaacaacattacctgttaatgtagcatttgagctttgggctaagcgcaacattaaaccagtaccagaggtgaaaatactcaataatttgggtgtggacattgctgctaatactgtgatctgggactacaaaagagatgctccagcacatatatctactattggtgtttgttctatgactgacatagccaagaaaccaactgaaacgatttgtgcaccactcactgtcttttttgatggtagagttgatggtcaagtagacttatttagaaatgcccgtaatggtgttcttattacagaaggtagtgttaaaggtttacaaccatctgtaggtcccaaacaagctagtcttaatggagtcacattaattggagaagccgtaaaaacacagttcaattattataagaaagttgatggtgttgtccaacaattacctgaaacttactttactcagagtagaaatttacaagaatttaaacccaggagtcaaatggaaattgatttcttagaattagctatggatgaattcattgaacggtataaattagaaggctatgccttcgaacatatcgtttatggagattttagtcatagtcagttaggtggtttacatctactgattggactagctaaacgttttaaggaatcaccttttgaattagaagattttattcctatggacagtacagttaaaaactatttcataacagatgcgcaaacaggttcatctaagtgtgtgtgttctgttattgatttattacttgatgattttgttgaaataataaaatcccaagatttatctgtagtttctaaggttgtcaaagtgactattgactatacagaaatttcatttatgctttggtgtaaagatggccatgtagaaacattttacccaaaattacaatctagtcaagcgtggcaaccgggtgttgctatgcctaatctttacaaaatgcaaagaatgctattagaaaagtgtgaccttcaaaattatggtgatagtgcaacattacctaaaggcataatgatgaatgtcgcaaaatatactcaactgtgtcaatatttaaacacattaacattagctgtaccctataatatgagagttatacattttggtgctggttctgataaaggagttgcaccaggtacagctgttttaagacagtggttgcctacgggtacgctgcttgtcgattcagatcttaatgactttgtctctgatgcagattcaactttgattggtgattgtgcaactgtacatacagctaataaatgggatctcattattagtgatatgtacgaccctaagactaaaaatgttacaaaagaaaatgactctaaagagggttttttcacttacatttgtgggtttatacaacaaaagctagctcttggaggttccgtggctataaagataacagaacattcttggaatgctgatctttataagctcatgggacacttcgcatggtggacagcctttgttactaatgtgaatgcgtcatcatctgaagcatttttaattggatgtaattatcttggcaaaccacgcgaacaaatagatggttatgtcatgcatgcaaattacatattttggaggaatacaaatccaattcagttgtcttcctattctttatttgacatgagtaaatttccccttaaattaaggggtactgctgttatgtctttaaaagaaggtcaaatcaatgatatgattttatctcttcttagtaaaggtagacttataattagagaaaacaacagagttgttatttctagtgatgttcttgttaacaactaa

SEQ ID NO: 92 - protein, 7096 aa, Severe acute respiratory syndrome coronavirus 2; identical to SEQ ID NO: 68

SEQ ID NO: 93 - DNA, 13218 bp, Severe acute respiratory syndrome coronavirus 2; identical to SEQ ID NO: 69

SEQ ID NO: 94 - protein, 4405 aa, Severe acute respiratory syndrome coronavirus 2 [sequence omitted]

SEQ ID NO: 95 - DNA, 3822 bp, Severe acute respiratory syndrome coronavirus 2
atgtttgtttttcttgttttattgccactagtctctagtcagtgtgttaatcttacaaccagaactcaattaccccctgcatacactaattctttcacacgtggtgtttattaccctgacaaagttttcagatcctcagttttacattcaactcaggacttgttcttacctttcttttccaatgttacttggttccatgctatacatgtctctgggaccaatggtactaagaggtttgataaccctgtcctaccatttaatgatggtgtttattttgcttccactgagaagtctaacataataagaggctggatttttggtactactttagattcgaagacccagtccctacttattgttaataacgctactaatgttgttattaaagtctgtgaatttcaattttgtaatgatccatttttgggtgtttattaccacaaaaacaacaaaagttggatggaaagtgagttcagagtttattctagtgcgaataattgcacttttgaatatgtctctcagccttttcttatggaccttgaaggaaaacagggtaatttcaaaaatcttagggaatttgtgtttaagaatattgatggttattttaaaatatattctaagcacacgcctattaatttagtgcgtgatctccctcagggtttttcggctttagaaccattggtagatttgccaataggtattaacatcactaggtttcaaactttacttgctttacatagaagttatttgactcctggtgattcttcttcaggttggacagctggtgctgcagcttattatgtgggttatcttcaacctaggacttttctattaaaatataatgaaaatggaaccattacagatgctgtagactgtgcacttgaccctctctcagaaacaaagtgtacgttgaaatccttcactgtagaaaaaggaatctatcaaacttctaactttagagtccaaccaacagaatctattgttagatttcctaatattacaaacttgtgcccttttggtgaagtttttaacgccaccagatttgcatctgtttatgcttggaacaggaagagaatcagcaactgtgttgctgattattctgtcctatataattccgcatcattttccacttttaagtgttatggagtgtctcctactaaattaaatgatctctgctttactaatgtctatgcagattcatttgtaattagaggtgatgaagtcagacaaatcgctccagggcaaactggaaagattgctgattataattataaattaccagatgattttacaggctgcgttatagcttggaattctaacaatcttgattctaaggttggtggtaattataattacctgtatagattgtttaggaagtctaatctcaaaccttttgagagagatatttcaactgaaatctatcaggccggtagcacaccttgtaatggtgttgaaggttttaattgttactttcctttacaatcatatggtttccaacccactaatggtgttggttaccaaccatacagagtagtagtactttcttttgaacttctacatgcaccagcaactgtttgtggacctaaaaagtctactaatttggttaaaaacaaatgtgtcaatttcaacttcaatggtttaacaggcacaggtgttcttactgagtctaacaaaaagtttctgcctttccaacaatttggcagagacattgctgacactactgatgctgtccgtgatccacagacacttgagattcttgacattacaccatgttcttttggtggtgtcagtgttataacaccaggaacaaatacttctaaccaggttgctgttctttatcagggtgttaactgcacagaagtccctgttgctattcatgcagatcaacttactcctacttggcgtgtttattctacaggttctaatgtttttcaaacacgtgcaggctgtttaataggggctgaacatgtcaacaactcatatgagtgtgacatacccattggtgcaggtatatgcgctagttatcagactcagactaattctcctcggcgggcacgtagtgtagctagtcaatccatcattgcctacactatgtcacttggtgcagaaaattcagttgcttactctaataactctattgccatacccacaaattttactattagtgttaccacagaaattctaccagtgtctatgaccaagacatcagtagattgtacaatgtacatttgtggtgattcaactgaatgcagcaatcttttgttgcaatatggcagtttttgtacacaattaaaccgtgctttaactggaatagctgttgaacaagacaaaaacacccaagaagtttttgcacaagtcaaacaaatttacaaaacaccaccaattaaagattttggtggttttaatttttcacaaatattaccagatccatcaaaaccaagcaagaggtcatttattgaagatctacttttcaacaaagtgacacttgcagatgctggcttcatcaaacaatatggtgattgccttggtgatattgctgctagagacctcatttgtgcacaaaagtttaacggccttactgttttgccacctttgctcacagatgaaatgattgctcaatacacttctgcactgttagcgggtacaatcacttctggttggacctttggtgcaggtgctgcattacaaataccatttgctatgcaaatggcttataggtttaatggtattggagttacacagaatgttctctatgagaaccaaaaattgattgccaaccaatttaatagtgctattggcaaaattcaagactcactttcttccacagcaagtgcacttggaaaacttcaagatgtggtcaaccaaaatgcacaagctttaaacacgcttgttaaacaacttagctccaattttggtgcaatttcaagtgttttaaatgatatcctttcacgtcttgacaaagttgaggctgaagtgcaaattgataggttgatcacaggcagacttcaaagtttgcagacatatgtgactcaacaattaattagagctgcagaaatcagagcttctgctaatcttgctgctactaaaatgtcagagtgtgtacttggacaatcaaaaagagttgatttttgtggaaagggctatcatcttatgtccttccctcagtcagcacctcatggtgtagtcttcttgcatgtgacttatgtccctgcacaagaaaagaacttcacaactgctcctgccatttgtcatgatggaaaagcacactttcctcgtgaaggtgtctttgtttcaaatggcacacactggtttgtaacacaaaggaatttttatgaaccacaaatcattactacagacaacacatttgtgtctggtaactgtgatgttgtaataggaattgtcaacaacacagtttatgatcctttgcaacctgaattagactcattcaaggaggagttagataaatattttaagaatcatacatcaccagatgttgatttaggtgacatctctggcattaatgcttcagttgtaaacattcaaaaagaaattgaccgcctcaatgaggttgccaagaatttaaatgaatctctcatcgatctccaagaacttggaaagtatgagcagtatataaaatggccatggtacatttggctaggttttatagctggcttgattgccatagtaatggtgacaattatgctttgctgtatgaccagttgctgtagttgtctcaagggctgttgttcttgtggatcctgctgcaaatttgatgaagacgactctgagccagtgctcaaaggagtcaaattacattacacataa

SEQ ID NO: 96 - protein, 1273 aa, Severe acute respiratory syndrome coronavirus 2; identical to SEQ ID NO: 72

SEQ ID NO: 97 - DNA, 828 bp, Severe acute respiratory syndrome coronavirus 2; identical to SEQ ID NO: 25

SEQ ID NO: 98 - protein, 275 aa, Severe acute respiratory syndrome coronavirus 2; identical to SEQ ID NO: 26

SEQ ID NO: 99 - DNA, 228 bp, Severe acute respiratory syndrome coronavirus 2; identical to SEQ ID NO: 27

SEQ ID NO: 100 - protein, 75 aa, Severe acute respiratory syndrome coronavirus 2; identical to SEQ ID NO: 28

SEQ ID NO: 101 - DNA, 669 bp, Severe acute respiratory syndrome coronavirus 2; identical to SEQ ID NO: 29

SEQ ID NO: 102 - protein, 222 aa, Severe acute respiratory syndrome coronavirus 2; identical to SEQ ID NO: 30

SEQ ID NO: 103 - DNA, 186 bp, Severe acute respiratory syndrome coronavirus 2
atgtttcatctcgttgactttcaggttactatagcagagatattactaattattatgaggacttttaaagtttccatttggaatcttgattacatcacaaacctcataattaaaaatttatctaagtcactaactgagaataaatattctcaattagatgaagagcaaccaatggagattgattaa

SEQ ID NO: 104 - protein, 61 aa, Severe acute respiratory syndrome coronavirus 2
MFHLVDFQVTIAEILLIIMRTFKVSIWNLDYITNLIIKNLSKSLTENKYSQLDEEQPMEID

SEQ ID NO: 105 - DNA, 366 bp, Severe acute respiratory syndrome coronavirus 2; identical to SEQ ID NO: 33

SEQ ID NO: 106 - protein, 121 aa, Severe acute respiratory syndrome coronavirus 2; identical to SEQ ID NO: 34

SEQ ID NO: 107 - DNA, 132 bp, Severe acute respiratory syndrome coronavirus 2; identical to SEQ ID NO: 35

SEQ ID NO: 108 - protein, 43 aa, Severe acute respiratory syndrome coronavirus 2; identical to SEQ ID NO: 36

SEQ ID NO: 109 - DNA, 366 bp, Severe acute respiratory syndrome coronavirus 2; identical to SEQ ID NO: 37

SEQ ID NO: 110 - protein, 121 aa, Severe acute respiratory syndrome coronavirus 2; identical to SEQ ID NO: 38

SEQ ID NO: 111 - DNA, 1260 bp, Severe acute respiratory syndrome coronavirus 2
atgtctgataatggaccccaaaatcagcgaaatgcaccccgcattacgtttggtggaccctcagattcaactggcagtaaccagaatggagaacgcagtggggcgcgatcaaaacaacgtcggccccaaggtttacccaataatactgcgtcttggttcaccgctctcactcaacatggcaaggaagaccttaaattccctcgaggacaaggcgttccaattaacaccaatagcagtccagatgaccaaattggctactaccgaagagctaccagacgaattcgtggtggtgacggtaaaatgaaagatctcagtccaagatggtatttctactacctaggaactgggccagaagctggacttccctatggtgctaacaaagacggcatcatatgggttgcaactgagggagccttgaatacaccaaaagatcacattggcacccgcaatcctgctaacaatgctgcaatcgtgctacaacttcctcaaggaacaacattgccaaaaggcttctacgcagaagggagcagaggcggcagtcaagcctcttctcgttcctcatcacgtagtcgcaacagttcaagaaattcaactccaggcagcagtaaacgaacttctcctgctagaatggctggcaatggcggtgatgctgctcttgctttgctgctgcttgacagattgaaccagcttgagagtaaaatgtctggtaaaggccaacaacaacaaggccaaactgtcactaagaaatctgctgctgaggcttctaagaagcctcggcaaaaacgtactgccactaaagcatacaatgtaacacaagctttcggcagacgtggtccagaacaaacccaaggaaattttggggaccaggaactaaccagacaaggaactgattacaaacattggccgcaaattgcacaatttgcccccagcgcttcagcgttcttcggaatgtcgcgcattggcatggaagtcacaccttcgggaacgtggttgacctacacaggtgccatcaaattggatgacaaagatccaaatttcaaagatcaagtcattttgctgaataagcatattgacgcatacaaaacattcccaccaacagagcctaaaaaggacaaaaagaagaaggctgatgaaactcaagccttaccgcagagacagaagaaacagcaaactgtgactcttcttcctgctgcagatttggatgatttctccaaacaattgcaacaatccatgagcagtgctgactcaactcaggcctaa

SEQ ID NO: 112 - protein, 419 aa, Severe acute respiratory syndrome coronavirus 2
MSDNGPQNQRNAPRITFGGPSDSTGSNQNGERSGARSKQRRPQGLPNNTASWFTALTQHGKEDLKFPRGQGVPINTNSSPDDQIGYYRRATRRIRGGDGKMKDLSPRWYFYYLGTGPEAGLPYGANKDGIIWVATEGALNTPKDHIGTRNPANNAAIVLQLPQGTTLPKGFYAEGSRGGSQASSRSSSRSRNSSRNSTPGSSKRTSPARMAGNGGDAALALLLLDRLNQLESKMSGKGQQQQGQTVTKKSAAEASKKPRQKRTATKAYNVTQAFGRRGPEQTQGNFGDQELTRQGTDYKHWPQIAQFAPSASAFFGMSRIGMEVTPSGTWLTYTGAIKLDDKDPNFKDQVILLNKHIDAYKTFPPTEPKKDKKKKADETQALPQRQKKQQTVTLLPAADLDDFSKQLQQSMSSADSTQA

SEQ ID NO: 113 - DNA, 117 bp, Severe acute respiratory syndrome coronavirus 2; identical to SEQ ID NO: 41

SEQ ID NO: 114 - protein, 38 aa, Severe acute respiratory syndrome coronavirus 2; identical to SEQ ID NO: 42

SEQ ID NO: 115 - protein, 1273 aa, Severe acute respiratory syndrome coronavirus 2; identical to SEQ ID NO: 5

SEQ ID NO: 116 - protein, 8 aa, Artificial Sequence
  Description of Artificial Sequence: Synthetic peptide
DYKDDDDK
